(19) United States
(12) Patent Application Publication
(10) Pub. No.: US 2020/0376028 A1
(43) Pub. Date: Dec. 3, 2020

(54) Methods and Compounds for Treating Diabetes

(71) Applicant: Yoram PALTI, Haifa (IL)

(72) Inventor: Yoram PALTI, Haifa (IL)

(21) Appl. No.: 16/603,438

(22) PCT Filed: Apr. 10, 2018
(86) PCT No.: PCT/IB2018/052477

§ 371 Date: Oct. 7, 2019

Related U.S. Application Data
(60) Provisional application No. 62/483,705, filed on Apr. 10, 2017.
(60) Provisional application No. 62/508,420, filed on May 19, 2017.
(60) Provisional application No. 62/560,986, filed on Sep. 20, 2017.

(51) Int. Cl. A61K 35/16; A61K 38/17; A61P 3/10; A61K 38/30

(52) U.S. Cl. CPC A61K 35/16; A61K 38/30; A61P 3/10; A61K 38/1709

(57) ABSTRACT

The disclosure provides for compounds, compositions, and methods of use thereof for treating diabetes (e.g., type 2 diabetes). In another aspect, one or more proteins described herein or compositions containing one or more proteins described herein are provided for. In yet another aspect, compounds, compositions, and methods containing one or more proteins described herein are used for treating a disorder in a patient in need thereof, such as type 2 diabetes.

### CROSS REFERENCE TO RELATED APPLICATIONS

[0001] This Application claims the benefit of U.S. Provisional Application 62/483,705, filed Apr. 10, 2017, U.S. Provisional Application 62/508,420, filed May 19, 2017, and U.S. Provisional Application 62/560,986, filed Sep. 20, 2017, each of which is incorporated herein by reference in its entirety.

### SEQUENCE LISTING

[0002] The instant application contains a Sequence Listing which has been submitted electronically in ASCII format and is hereby incorporated by reference in its entirety. Said ASCII copy, created on Apr. 9, 2018, is named 1462-0013WO_SL.txt and is 2,276,869 bytes in size.

### FIELD OF THE DISCLOSURE

[0003] The disclosure provides for compounds, compositions, and methods of use thereof for treating diabetes (e.g., type 2 diabetes) or other disorders. in another aspect, the disclosure provides for one or more proteins described herein or compositions containing the one or more proteins. In yet another aspect, compounds or compositions containing one or more proteins selected from SEQ NOs: 1-438 described herein are administered to a patient in need thereof to treat diabetes or diabetes related disorders.

### BACKGROUND

[0004] Diabetes mellitus (DM), commonly referred to as diabetes, is a major, worldwide medical problem. As of 2015, an estimated 415 million people had diabetes worldwide, with type 2 DM making up about 90% of the cases. This represents 8.3% of the adult population, with equal rates in both women and men. The incidence of DM is increasing in most of the world populations.

[0005] Diabetes is a group of metabolic diseases in which there are high blood sugar levels over a prolonged period. Symptoms of high blood sugar include frequent urination, increased thirst, and increased hunger. If left untreated, diabetes can cause many complications. Acute complications can include diabetic ketoacidosis, non-ketotic hyperosmolar coma, or death. Serious long-term complications include heart disease, stroke, chronic kidney failure, foot ulcers, and damage to the eyes.

[0006] Diabetes is due to, for example, the pancreas not producing enough insulin or to the cells of the body not responding properly to the insulin produced. There are three main types of diabetes mellitus: (1) Type 1 DM results from the pancreas's failure to produce enough insulin. This torn was previously referred to as “insulin-dependent diabetes mellitus” (IDDM) or “juvenile diabetes”. The cause is unknown. (2) Type 2 DM begins with insulin resistance, a condition in which cells fail to respond to insulin properly. As the disease progresses a lack of insulin may also develop. This form was previously referred to as “non-insulin dependent diabetes mellitus” (NIDDM) or “adult-onset diabetes”. The primary cause is excessive body weight and not enough exercise. (3) Gestational diabetes is the third main form and occurs when pregnant women without a previous history of diabetes develop high blood-sugar levels.

[0007] Type 1 DM can be managed with insulin injections. Type 2 DM may be treated with medications with or without insulin. Insulin and some oral medications can cause low blood sugar. Gestational diabetes usually resolves after the birth of the baby.

[0008] A recent study showed that 84 percent of patients who underwent Roux-en-Y gastric bypass (RYGB) experienced complete remission of their type 2 diabetes. Cummings, DE, Endocrine Mechanisms Mediating Remission of Diabetes after Gastric Bypass Surgery, Int J Obes (Lond), 2009 Apr; 33 Suppl 1: S33-40. The reason for this improvement, however, is not known.

### SUMMARY OF THE INVENTION

[0009] In an aspect, the disclosure provides for a pharmaceutical composition comprising one or more proteins selected from the group consisting of an amino acid sequence at least 95% identical to one of SEQ ID NOs: 1-438; and a pharmaceutically acceptable excipient.

[0010] In an aspect, the disclosure provides for a pharmaceutical composition comprising one or more proteins selected from the group consisting of an amino acid sequence at least 98% identical to one of SEQ ID NOs: 1-438; and a pharmaceutically acceptable excipient.

[0011] In an aspect, the disclosure provides for a pharmaceutical composition comprising one or more proteins selected from the group consisting of an amino acid sequence at least 99% identical to one of SEQ ID NOs: 1-438; and a pharmaceutically acceptable excipient.

[0012] In an aspect, the disclosure provides for methods of treating diabetes in a patient in need thereof comprising administering an effective amount of a pharmaceutical composition including one or more proteins selected from the group consisting of an amino acid sequence at least 95% identical to one of SEQ ID NOs: 1-438; and a pharmaceutically acceptable excipient.

[0013] In another aspect, the disclosure provides for a method of treating diabetes, abnormal insulin resistance, abnormal blood glucose level, abnormal insulin level, hyperinsulinemia, glycosylated hemoglobin level, or a combination thereof. The method comprises administering a pharmaceutical composition including one or more proteins to a patient in need thereof, wherein said one or more proteins are selected from the group consisting of an amino acid sequence at least 95% identical to one of SEQ ID NOs: 1-438.

[0014] In another aspect, a composition or method described herein comprises only one, only two, only three, only four, or five or more proteins selected from SEQ ID NOs: 1-173. In another aspect, a composition or method described herein comprises only one, only two, only three, only four, or five or more proteins selected from SEQ ID NOs: 174-438. In another aspect, a composition or method described herein comprises only one, only two, only three, only four, or five or more proteins selected from SEQ ID NOs: 1-438.

[0015] In another aspect, an amino acid sequence is at least 98% identical to one of SEQ ID NOs: 1-173. In another aspect, an amino acid sequence is at least 98% identical to one of SEQ ID NOs: 174-438. In another aspect, an amino acid sequence is at least 98% identical to one of SEQ ID NOs: 1-438.

[0016] In another aspect, an amino acid sequence described herein is at least 99% identical to one of SEQ ID NOs: 1-173, In another aspect, an amino acid sequence described herein is at least 99% identical to one of SEQ ID NOs: 174-438. In another aspect, an amino acid sequence described herein is at least 99% identical to one of SEQ ID NOs: 1-438.

[0017] In an aspect, a composition or method described herein comprises only one of these proteins. In another aspect, a composition or method described herein comprises only two proteins. In another aspect, a composition or method described herein comprises only three proteins. In another aspect, a composition or method described herein comprises only four proteins. In another aspect, a composition or method described herein comprises five or more proteins.

[0018] In another aspect, a composition described herein is administered to a patient who has not undergone bariatric surgery.

[0019] In another aspect, a composition described herein is administered to a patient who exhibits abnormal insulin resistance, blood glucose level, insulin level, glycosylated hemoglobin level, or a combination thereof.

[0020] In an aspect, the disclosure provides for a pharmaceutical composition comprising: a protein with an amino acid sequence at least 95% identical to SEQ ID NO 25; and a pharmaceutically acceptable excipient. In another aspect, the protein has an amino acid sequence at least 98% identical to SEQ ID NO 25. in another aspect, the protein has an amino acid sequence at least 99% identical to SEQ m NO 25.

[0021] In an aspect, the disclosure provides for methods of treating diabetes in a patient in need thereof comprising administering an effective amount of a pharmaceutical composition including a protein with an amino acid sequence at least 95% identical to SEQ ID NO 25; and a pharmaceutically acceptable excipient.

[0022] In another aspect, the disclosure provides for a method of treating diabetes, abnormal insulin resistance, abnormal blood glucose level, abnormal insulin level, hyperinsulinemia, glycosylated hemoglobin level, or a combination thereof, the method comprising administering a pharmaceutical composition comprising a protein to a patient in need thereof, wherein said protein has an amino acid sequence at least 95% identical to SEQ ID NO 25.

[0023] In another aspect, the protein has an amino acid sequence at least 98% identical to SEQ ID NO 25. In another aspect, the protein has an amino acid sequence at least 99% identical to SEQ ID NO 25.

[0024] In another aspect, a composition described herein is administered to a patient who has not undergone bariatric surgery.

[0025] In another aspect, a composition described herein is administered to a patient who exhibits abnormal insulin resistance, blood glucose level, insulin level, glycosylated hemoglobin level, or a combination thereof.

[0026] In another aspect, the disclosure provides for a pharmaceutical composition comprising IGF or a variant thereof, and a pharmaceutically acceptable carrier, wherein the IGF or variant thereof is present in an effective amount for treating diabetes. Optionally, the composition is suitable for intravenous administration.

[0027] In another aspect, the disclosure provides for a pharmaceutical composition comprising IGF-2 or a variant thereof, and a pharmaceutically acceptable carrier, wherein the IGF-2 or variant thereof is present in an effective amount for treating diabetes. Optionally, the IGF-2 of this aspect is human. Optionally, the human IGF-2 is recombinant. Optionally, the recombinant human IGF-2 variant is at least 85% identical to IGF-2 (SEQ ID NO: 25).

[0028] In another aspect, the disclosure provides for a method of treating diabetes in a subject who has not undergone bariatric surgery comprising administering to a subject in need thereof an effective amount of IGF or a variant thereof. Optionally, the IGF or variant thereof is IGF-2. Optionally, the IGF-2 is administered by intravenous injection. Optionally, the IGF-2 is administered in a single dose.

[0029] In another aspect, the disclosure provides for a method of treating diabetes comprising administering to a subject in need thereof an effective amount of human IGF-2 or a variant thereof. Optionally, the human IGF-2 is recombinant.

### BRIEF DESCRIPTION OF THE DRAWINGS

[0030] FIG. 1 depicts the blood glucose levels during an experiment in which RYGB was performed on diabetic pigs.

[0031] FIGS. 2A and 2B depict the blood glucose levels in an experiment in which the full serum was injected to two diabetic piglets, respectively.

[0032] FIG. 3 depicts the separation of the full serum using cation exchange fractionation into three fractions.

[0033] FIG. 4 depicts how the blood glucose levels changed over time in response to injection of each of the fractions identified in FIG. 3.

[0034] FIG. 5 depicts the separation of the full serum using HiLoad Superdex 75 fractionation into four fractions.

[0035] FIG. 6 depicts how the blood glucose levels changed over time in response to injection of each of the fractions identified in FIG. 5.

[0036] FIG. 7 depicts results from beta cell insulin secretion tests performed using the full serum and two fractions thereof.

[0037] FIG. 8 depicts results from beta cell insulin secretion tests performed using active GLP-1 and fraction C from the cation exchange process.

[0038] FIGS. 9A and 9B depict the blood glucose levels in an experiment in which rhIGF-2 was injected to two diabetic piglets, respectively.

[0039] FIG. 10 shows that rIGF-2 and AH-2 post-operation serum elevate insulin secretion from beta cells in vitro.

[0040] FIG. 11 depicts additional data showing that post-operation pig serum elevates insulin secretion from beta cells in vitro.

### DESCRIPTION OF THE PREFERRED EMBODIMENTS

[0041] The disclosure provides for biological compounds, such as proteins, as set forth in SEQ ID NOs: 1-438. Compositions comprising biological compounds described herein and methods of use thereof are also provided. In an aspect, the disclosure provides for methods of treating a patient in need thereof with a composition comprising, consisting essentially of, or consisting of SEQ ID NOs: 1-438. In another aspect, a pharmaceutical composition described herein is administered to a patient who has not undergone bariatric surgery. The disclosure further provides for combinations of SEQ ID NOs: 1-438 or combinations of proteins described in Table 1. In an aspect, combinations of SEQ ID NOs: 1-438 can be used in a composition to treat a patient in need thereof, wherein the patient has diabetes, type 2 diabetes, cardiac disease, or any disorder related to obesity.

[0042] The term “bariatric surgery” refers, for example, to Roux-en-Y gastric bypass surgery (often called “gastric bypass”), laparoscopic sleeve gastrectomy (often called “the sleeve” or “gastric sleeve”), adjustable gastric band surgery (often called “the band”), and biliopancreatic diversion with duodenal switch gastric bypass (often abbreviated as “BPD/DS”). In an aspect, bariatric surgery is selected from the group consisting of gastric bypass surgery, laparoscopic sleeve gastrectomy, adjustable gastric band surgery, and biliopancreatic diversion with duodenal switch surgery.

[0043] Methods described herein may further comprise reducing at least one of insulin resistance, blood glucose level, obesity, hyperinsulinemia, glycosylated hemoglobin level, or a combination thereof in the subject. In an aspect, the disclosure provides for reducing at least one of insulin resistance, blood glucose level, obesity, hyperinsulinemia, glycosylated hemoglobin level, or a combination thereof by administering a composition or biological compound described herein, for example, one, two, three, four, five, or more proteins selected from SEQ ID NOs: 1-173, SEQ ID NOs: 174-438, or SEQ ID NOs: 1-438.

TABLE 1

| SEQ ID NO: | Human Accession | Gene Name |
|---|---|---|
| 1 | O00391 | QSOX1 |
| 2 | O00602 | FCN1 |
| 3 | O43866 | CD5L |
| 4 | O60462 | NRP2 |
| 5 | O95445 | APOM |
| 6 | O95678 | KRT75 |
| 7 | P00450 | CP |
| 8 | P00734 | F2 |
| 9 | P00736 | C1R |
| 10 | P00738 | HP |
| 11 | P00740 | F9 |
| 12 | P00742 | F10 |
| 13 | P00746 | CFD |
| 14 | P00747 | PLG |
| 15 | P00748 | F12 |
| 16 | P00751 | CFB |
| 17 | P00918 | CA2 |
| 18 | P01008 | SERPINC1 |
| 19 | P01009 | SERPINA1 |
| 20 | P01023 | A2M |
| 21 | P01024 | C3 |
| 22 | P01031 | C5 |
| 23 | P01034 | CST3 |
| 24 | P01042 | KNG1 |
| 25 | P01344 | IGF2 |
| 26 | P01591 | JCHAIN |
| 27 | P01834 | IGKC |
| 28 | P02461 | COL3A1 |
| 29 | P02533 | KRT14 |
| 30 | P02647 | APOA1 |
| 31 | P02649 | APOE |
| 32 | P02652 | APOA2 |
| 33 | P02655 | APOC2 |
| 34 | P02656 | APOC3 |
| 35 | P02741 | CRP |
| 36 | P02743 | APCS |
| 37 | P02745 | C1QA |
| 38 | P02747 | C1QC |
| 39 | P02748 | C9 |
| 40 | P02749 | APOH |
| 41 | P02751 | FN1 |
| 42 | P02760 | AMBP |
| 43 | P02765 | AHSG |
| 44 | P02768 | ALB |
| 45 | P02774 | GC |
| 46 | P02775 | PPBP |
| 47 | P02787 | TF |
| 48 | P02788 | LTF |
| 49 | P02790 | HPX |
| 50 | P03950 | ANG |
| 51 | P03952 | KLKB1 |
| 52 | P04003 | C4BPA |
| 53 | P04004 | VTN |
| 54 | P04040 | CAT |
| 55 | P04070 | PROC |
| 56 | P04075 | ALDOA |
| 57 | P04180 | LCAT |
| 58 | P04196 | HRG |
| 59 | P04217 | A1BG |
| 60 | P04275 | VWF |
| 61 | P04406 | GAPDH |
| 62 | P05090 | APOD |
| 63 | P05121 | SERPINE1 |
| 64 | P05154 | SERPINA5 |
| 65 | P05155 | SERPING1 |
| 66 | P05156 | CF1 |
| 67 | P05160 | F13B |
| 68 | P05452 | CLEC3B |
| 69 | P05546 | SERPIND1 |
| 70 | P06396 | GSN |
| 71 | P06681 | C2 |
| 72 | P06727 | APOA4 |
| 73 | P06733 | ENO1 |
| 74 | P06753 | TPM3 |
| 75 | P07195 | LDHB |
| 76 | P07355 | ANXA2 |
| 77 | P07357 | C8A |
| 78 | P07358 | C8B |
| 79 | P07360 | C8G |
| 80 | P07711 | CTSL |
| 81 | P07996 | THBS1 |
| 82 | P08123 | COL1A2 |
| 83 | P08697 | SERPINF2 |
| 84 | P08833 | IGFBP1 |
| 85 | P09871 | C1s |
| 86 | P0C0L4 | C4A |
| 87 | P10643 | C7 |
| 88 | P10909 | CLU |
| 89 | P11021 | HSPA5 |
| 90 | P11226 | MBL2 |
| 91 | P11717 | IGF2R |
| 92 | P12111 | COL6A3 |
| 93 | P12259 | F5 |
| 94 | P13645 | KRT10 |
| 95 | P13671 | C6 |
| 96 | P13796 | LCP1 |
| 97 | P14151 | SELL |
| 98 | P14618 | PKM |
| 99 | P14780 | MMP9 |
| 100 | P14923 | Jup |
| 101 | P15169 | CPN1 |
| 102 | P15328 | FOLR1 |
| 103 | P15924 | DSP |
| 104 | P16035 | TIMP-2 |
| 105 | P17936 | IGFBP3 |
| 106 | P18065 | IGFBP2 |
| 107 | P18428 | LBP |
| 108 | P19012 | KRT15 |
| 109 | P19013 | KRT4 |
| 110 | P19823 | ITIH2 |
| 111 | P19827 | ITIH1 |
| 112 | P20023 | CR2 |
| 113 | P20851 | C4BPB |
| 114 | P22079 | LPO |
| 115 | P22692 | IGFBP4 |
| 116 | P22792 | CPN2 |
| 117 | P23142 | FBLN1 |
| 118 | P26927 | MST1 |
| 119 | P27918 | CFP |
| 120 | P28799 | GRN |
| 121 | P29279 | CTGF |
| 122 | P33151 | CDH5 |
| 123 | P34096 | RNASE4 |
| 124 | P35858 | ALS |
| 125 | P36955 | SERPINF1 |
| 126 | P43652 | AFM |
| 127 | P49908 | SEPP1 |
| 128 | P53634 | CTSC |
| 129 | P55056 | APOC4 |
| 130 | P61769 | B2M |
| 131 | P63261 | ACTG1 |
| 132 | P67936 | TPM4 |
| 133 | P68871 | HBB |
| 134 | P80108 | GPLD1 |
| 135 | Q02413 | DSG1 |
| 136 | Q03167 | TGFBR3 |
| 137 | Q04756 | HGFAC |
| 138 | Q06033 | ITIH3 |
| 139 | Q08830 | FGL1 |
| 140 | Q13103 | SPP2 |
| 141 | Q13822 | ENPP2 |
| 142 | Q14126 | DSG2 |
| 143 | Q14520 | HABP2 |
| 144 | Q14624 | ITIH4 |
| 145 | Q15113 | PCOLCE |
| 146 | Q15582 | TGFBI |
| 147 | Q16270 | IGFBP7 |
| 148 | Q16394 | EXT1 |
| 149 | Q16610 | ECM1 |
| 150 | Q5XKE5 | KRT79 |
| 151 | Q6EMK4 | VASN |
| 152 | Q6P2Q9 | PRPF8 |
| 153 | Q76LX8 | ADAMTS13 |
| 154 | Q7RTS7 | KRT74 |
| 155 | Q7Z794 | KRT77 |
| 156 | Q86U17 | SERPINA11 |
| 157 | Q86UD1 | OAF |
| 158 | Q86WD7 | LOC100155953 |
| 159 | Q8NBP7 | PCSK9 |
| 160 | Q92954 | PRG4 |
| 161 | Q93088 | bhmt |
| 162 | Q96EG1 | ARSG |
| 163 | Q96IY4 | CPB2 |
| 164 | Q96PD5 | PGLYRP2 |
| 165 | Q99435 | NELL2 |
| 166 | Q99784 | OLFM1 |
| 167 | Q99972 | MYOC |
| 168 | Q9BWP8 | COLEC11 |
| 169 | Q9NPY3 | CD93 |
| 170 | Q9NRN5 | OLFML3 |
| 171 | Q9UBQ6 | EXTL2 |
| 172 | Q9UGM5 | FETUB |
| 173 | Q9UHG3 | PCYOX1 |

TABLE 2

| SEQ ID NO: | Porcine Accession | Gene Name |
|---|---|---|
| 174 | A0A075B7H6 | — |
| 175 | A0A075B7H9 | — |
| 176 | A0A075B712 | — |
| 177 | A0A075B713 | — |
| 178 | A0A075B715 | — |
| 179 | A0A075B716 | — |
| 180 | A0A075B717 | — |
| 181 | A0A075B719 | — |
| 182 | A0A075B7J0 | — |
| 183 | A0A0C3SG01 | APOA1 |
| 184 | A0A140TAK8 | APOH |
| 185 | A0SEH3 | C8G |
| 186 | A5D9L6 | APOM |
| 187 | A5PF01 | BF |
| 188 | A8R080 | SELL |
| 189 | C0JPM4 | TIMP-2 |
| 190 | D3Y264 | APOC2 |
| 191 | E7D6R2 | bhmt |
| 192 | E9KYT3 | IGFBP4 |
| 193 | F1RHH8 | PRPF8 |
| 194 | F1RII7 | HBB |
| 195 | F1RJ76 | CRP |
| 196 | F1RK01 | CPB2 |
| 197 | F1RK02 | LCP1 |
| 198 | F1RKY2 | SERPIND1 |
| 199 | F1RL06 | LOC100523213 |
| 200 | F1RM24 | — |
| 201 | F1RM45 | APOE |
| 202 | F1RM46 | APOC4 |
| 203 | F1RM73 | — |
| 204 | F1RMN7 | HPX |
| 205 | F1RN41 | F10 |
| 206 | F1RN76 | CD5L |
| 207 | F1RPW2 | F5 |
| 208 | F1RQ75 | F9 |
| 209 | F1RQW2 | C4A |
| 210 | F1RQW6 | CFB |
| 211 | F1RQW7 | C2 |
| 212 | F1RQZ0 | GRN |
| 213 | F1RRP2 | LPO |
| 214 | F1RS36 | HSPA5 |
| 215 | F1RUE4 | GPLD1 |
| 216 | F1RUL6 | LOC100524373 |
| 217 | F1RUM1 | AFM |
| 218 | F1RUN2 | ALB |
| 219 | F1RUQ0 | JCHAIN |
| 220 | F1RV22 | ARSG |
| 221 | F1RVH7 | IGFBP7 |
| 222 | F1RW75 | DSP |
| 223 | F1RWV1 | CFP |
| 224 | F1RX35 | LOC100627396 |
| 225 | F1RX36 | LOC102158263 |
| 226 | F1RXC2 | CA2 |
| 227 | F1RXF8 | — |
| 228 | F1RYI8 | COL3A1 |
| 229 | F1RZN7 | KLKB1 |
| 230 | F1S073 | ANXA2 |
| 231 | F1S0J2 | C4BPA |
| 232 | F1S0J3 | C4BPB |
| 233 | F1S0K2 | KRT15 |
| 234 | F1S0L1 | KRT14 |
| 235 | F1S1A9 | APOA2 |
| 236 | F1S274 | EXT1 |
| 237 | F1S280 | ENPP2 |
| 238 | F1S3H9 | LOC100517145 |
| 239 | F1S3P6 | CTGF |
| 240 | F1S568 | EXTL2 |
| 241 | F1S5J5 | HABP2 |
| 242 | F1S643 | — |
| 243 | F1S682 | QSOX1 |
| 244 | F1S788 | C8A |
| 245 | F1S790 | C8B |
| 246 | F1S7T0 | MYOC |
| 247 | F1S8N1 | HGFAC |
| 248 | F1S8V7 | CPN1 |
| 249 | F1S9B8 | LOC100526034 |
| 250 | F1S9B9 | LOC100525680 |
| 251 | F1S9C0 | — |
| 252 | F1SAT8 | CD93 |
| 253 | F1SB67 | IGF2R |
| 254 | F1SB81 | PLG |
| 255 | F1SBR6 | OLFML3 |
| 256 | F1SBS4 | — |
| 257 | F1SC20 | A1BG |
| 258 | F1SC56 | MMP9 |
| 259 | F1SCC6 | LOC100153899 |
| 260 | F1SCC7 | LOC100156325 |
| 261 | F1SCC9 | LOC106504545 |
| 262 | F1SCD0 | LOC396685 |
| 263 | F1SCD1 | — |
| 264 | F1SCE3 | SERPINA5 |
| 265 | F1SCE6 | LOC100155953 |
| 266 | F1SCF0 | SERPINA1 |
| 267 | F1SCV8 | — |
| 268 | F1SCV9 | — |
| 269 | F1SD23 | — |
| 270 | F1SD33 | LOC100158011 |
| 271 | F1SD69 | — |
| 272 | F1SET0 | FGL1 |
| 273 | F1SFA1 | — |
| 274 | F1SFA7 | COL1A2 |
| 275 | F1SFI4 | KNG1 |
| 276 | F1SFI5 | HRG |
| 277 | F1SFI6 | FETUB |
| 278 | F1SFI7 | AHSG |
| 279 | F1SGG9 | LOC100737483 |
| 280 | F1SGI7 | KRT75 |
| 281 | F1SGS1 | LOC100154047 |
| 282 | F1SGS9 | CAT |
| 283 | F1SGY4 | NELL2 |
| 284 | F1SH92 | ITIH4 |
| 285 | F1SH94 | ITIH3 |
| 286 | F1SH96 | ITIH1 |
| 287 | F1SHL9 | PKM |
| 288 | F1SIB1 | F2 |
| 289 | F1SJT7 | APOA4 |
| 290 | F1SJW8 | SERPING1 |
| 291 | F1SK70 | — |
| 292 | F1SLV6 | C1R |
| 293 | F1SLX2 | A2M |
| 294 | F1SM61 | FBLN1 |
| 295 | F1SME1 | C5 |
| 296 | F1SMI8 | C6 |
| 297 | F1SMJ1 | C7 |
| 298 | F1SMJ6 | C9 |
| 299 | F1SPS6 | MST1 |
| 300 | F1SQX9 | APOD |
| 301 | F1SRC8 | CLEC3B |
| 302 | F1SS24 | FN1 |
| 303 | F1SS26 | THBS1 |
| 304 | F1SSB4 | — |
| 305 | F1SSB5 | ALDOA |
| 306 | F1STC2 | — |
| 307 | F1STC3 | — |
| 308 | F1STC5 | IGKC |
| 309 | F1STR1 | CTSC |
| 310 | F1STZ1 | LOC100739136 |
| 311 | F1STZ3 | C1QC |
| 312 | F1STZ4 | C1QA |
| 313 | F2Z5E2 | SERPINC1 |
| 314 | Q0PM28 | SERPINF1 |
| 315 | I3L5C4 | KRT74 |
| 316 | I3L5K0 | — |
| 317 | I3L5N3 | — |
| 318 | I3L5U6 | LBP |
| 319 | I3L5Z3 | PRG4 |
| 320 | I3L638 | VTN |
| 321 | I3L651 | — |
| 322 | I3L6D7 | DSG2 |
| 323 | I3L6Q6 | F13B |
| 324 | I3L6U3 | — |
| 325 | I3L728 | — |
| 326 | I3L7X9 | NPG1 |
| 327 | I3L818 | SERPINF2 |
| 328 | I3L9F5 | PCYOX1 |
| 329 | I3LA65 | DSG1 |
| 330 | I3LAQ0 | — |
| 331 | I3LB28 | NRP2 |
| 332 | I3LBF1 | ICA |
| 333 | I3LBZ1 | — |
| 334 | I3LC64 | ECM1 |
| 335 | I3LDS3 | KRT10 |
| 336 | I3LDZ2 | RNASE4 |
| 337 | I3LEE6 | PCOLCE |
| 338 | I3LEW0 | COLEC11 |
| 339 | I3LF89 | CPN2 |
| 340 | I3LFH1 | — |
| 341 | I3LG75 | — |
| 342 | I3LGB2 | PCSK9 |
| 343 | I3LGI8 | FCN1 |
| 344 | I3LHF9 | OLFM1 |
| 345 | I3LHW8 | LOC100622782 |
| 346 | I3LJ81 | — |
| 347 | I3LJP2 | SEPP1 |
| 348 | I3LK29 | LCAT |
| 349 | I3LK59 | ENO1 |
| 350 | I3LK97 | CR2 |
| 351 | I3LKV5 | ADAMTS13 |
| 352 | I3LKZ1 | — |
| 353 | I3LL80 | LDHB |
| 354 | I3LLY8 | KRT79 |
| 355 | I3LMI9 | — |
| 356 | I3LMU0 | SERPINA11 |
| 357 | I3LN42 | GC |
| 358 | I3LNM9 | LOC100624077 |
| 359 | I3LNT6 | KRT77 |
| 360 | I3LPW3 | — |
| 361 | I3LQ17 | — |
| 362 | I3LQM5 | — |
| 363 | I3LQN8 | KRT4 |
| 364 | I3LQQ6 | SERPINE1 |
| 365 | I3LRJ4 | PROC |
| 366 | I3LS87 | VASN |
| 367 | I3LSF4 | — |
| 368 | I3LTB8 | — |
| 369 | I3LUM4 | OAF |
| 370 | I3LUR7 | COL6A3 |
| 371 | I3LVD5 | ACTG1 |
| 372 | K7GNN0 | VWF |
| 373 | K7GNW0 | — |
| 374 | K7GPQ7 | — |
| 375 | K7GPW1 | CFI |
| 376 | K7GQ48 | A2M |
| 377 | K7GQB8 | CP |
| 378 | K7GRI3 | CP |
| 379 | O02668 | ITIH2 |
| 380 | O02840 | CDH5 |
| 381 | O11780 | TGFBI |
| 382 | O19063 | APCS |
| 383 | O97507 | F12 |
| 384 | P00355 | GAPDH |
| 385 | P01025 | C3 |
| 386 | P01846 | — |
| 387 | P01965 | HBA |
| 388 | P04366 | AMBP |
| 389 | P06867 | PLG |
| 390 | P09571 | TF |
| 391 | P12067 | LYSC |
| 392 | P14632 | LTF |
| 393 | P16293 | F9 |
| 394 | P16611 | IGFBP3 |
| 395 | P20305 | GSN |
| 396 | P23695 | IGF2 |
| 397 | P24853 | IGFBP2 |
| 398 | P27917 | APOC3 |
| 399 | P31346 | ANG |
| 400 | P35054 | TGFBR3 |
| 401 | P43030 | PPBP |
| 402 | P48819 | VTN |
| 403 | P50828 | HPX |
| 404 | P51779 | CFD |
| 405 | P67937 | TPM4 |
| 406 | P79263 | ITIH4 |
| 407 | Q03472 | APOR |
| 408 | Q07717 | B2M |
| 409 | Q0Z8R0 | CST3 |
| 410 | Q1KS52 | ALS |
| 411 | Q28833 | VWF |
| 412 | Q28944 | CTSL |
| 413 | Q29052 | ITIH1 |
| 414 | Q29545 | ICA |
| 415 | Q29549 | CLU |
| 416 | Q68RU1 | ApoN |
| 417 | Q69DK8 | C1s |
| 418 | Q6QA25 | TPM3 |
| 419 | Q6YT39 | LTF |
| 420 | Q711S8 | SPP2 |
| 421 | Q75ZP3 | IGFBP1 |
| 422 | Q866Y3 | PGLYRP2 |
| 423 | Q8SPS7 | HP |
| 424 | Q8WNW3 | Jup |
| 425 | Q9GLP1 | F5 |
| 426 | Q9GLP2 | PROC |
| 427 | Q9GMA6 | SERPINA3-2 |
| 428 | Q9TUQ3 | C7 |
| 429 | Q9XSH0 | FOLR1 |
| 430 | Q9XSW3 | MBL2 |
| 431 | A0A075B7I7 | — |
| 432 | F1RM46 | APOC4 |
| 433 | F1S0L1 | KRT14 |
| 434 | F1S7T0 | MYOC |
| 435 | F1SCV8 | — |
| 436 | F1SSB4 | — |
| 437 | I3LAQ0 | — |
| 438 | I3LAQ0 | — |

[0044] In an aspect, the disclosure relates to a method of treating diabetes for example, type 2 diabetes comprising administering an effective amount of a pharmaceutical composition comprising one or more proteins selected from the group consisting of SEQ ID NOs: 1-438 to a patient in need thereof. In an aspect, the patient has not undergone bariatric surgery. In an aspect, the composition further comprises a pharmaceutically acceptable excipient or pharmaceutically acceptable salt.

[0045] In yet another aspect, this disclosure relates to a method of treating diabetes for example, type 2 diabetes comprising administering an effective amount of a pharmaceutical composition comprising a pharmaceutically acceptable excipient and two or more proteins selected from the group consisting; of SEQ ID NOs: 1-438 to a patient in need thereof. In an aspect, the patient has not undergone bariatric surgery.

[0046] In an aspect, this disclosure relates to a method of treating type 2 diabetes comprising administering an effective amount of a pharmaceutical composition comprising a pharmaceutically acceptable excipient and three or more proteins selected from the group consisting of SEQ ID NOs: 1-438 to a patient in need thereof. in an aspect, the patient has not undergone bariatric surgery.

[0047] In another aspect, this disclosure relates to a method of treating type 2 diabetes comprising administering an effective amount of a pharmaceutical composition comprising a pharmaceutically acceptable excipient and four or more proteins selected from the group consisting of SEQ ID NOs: 1-438 to a patient in need thereof. in an aspect, the patient has not undergone bariatric surgery.

[0048] In another aspect, this disclosure relates to a method of treating type 2 diabetes comprising administering an effective amount of a pharmaceutical composition comprising a pharmaceutically acceptable excipient and only one protein selected from the group consisting of SEQ ID NOs: 1-438 to a patient in need thereof. In an aspect, the patient has not undergone bariatric surgery.

[0049] In another aspect, this disclosure relates to a method of treating type 2 diabetes comprising administering an effective amount of a pharmaceutical composition comprising a pharmaceutically acceptable excipient and only two proteins selected from the group consisting of SEQ ID NOs: 1-438 to a patient in need thereof. In an aspect, the patient has not undergone bariatric surgery.

[0050] In another aspect, this disclosure relates to a method of treating type 2 diabetes comprising administering an effective amount of a pharmaceutical composition comprising a pharmaceutically acceptable excipient and only three proteins selected from the group consisting of SEQ ID NOs: 1-438 to a patient in need thereof. In an aspect, the patient has not undergone bariatric surgery.

[0051] In another aspect, this disclosure relates to a method of treating type 2 diabetes comprising administering an effective amount of a pharmaceutical composition comprising a pharmaceutically acceptable excipient and only four proteins selected from the group consisting of SEQ ID NOs: 1-438 to a patient in need thereof. In an aspect, the patient has not undergone bariatric surgery.

[0052] The active components described for use herein can be included in a pharmaceutically suitable vehicle, selected to render such compositions amenable to delivery by oral, rectal, parenteral (e.g., intravenous, intramuscular, intraarterial, intraperitoneal, and the like), or inhalation routes, osmotic pump, and the like.

[0053] Pharmaceutical compositions contemplated for use in the practice of the present invention can be used in the form of a solid, a solution, an emulsion, a dispersion, a micelle, a liposome, and the like, wherein the resulting composition contains one or more of the active compounds contemplated for use herein, as active ingredients thereof, in admixture with an organic or inorganic carrier or excipient suitable for nasal, enteral or parenteral applications. The active ingredients may be compounded, for example, with the usual non-toxic, pharmaceutically and physiologically acceptable carriers for tablets, pellets, capsules, troches, lozenges, aqueous or oily suspensions, dispersible powders or granules, suppositories, solutions, emulsions, suspensions, hard or soft capsules, caplets or syrups or elixirs and any other form suitable for use. The carriers that can be used include glucose, lactose, gum acacia, gelatin, mannitol, starch paste, magnesium trisilicate, talc, corn starch, keratin, colloidal silica, potato starch, urea, medium chain length triglycerides, dextrans, and other carriers suitable for use in manufacturing preparations, in solid, semisolid, or liquid form. In addition, auxiliary, stabilizing, thickening and coloring agents may be used. The active compounds contemplated for use herein are included in the pharmaceutical composition in an amount sufficient to produce the desired effect upon the target process, condition or disease.

[0054] In addition, such compositions may contain one or more agents selected from flavoring agents (such as peppermint, oil of wintergreen or cherry), coloring agents, preserving agents, and the like, to provide pharmaceutically elegant and palatable preparations. Tablets containing the active ingredients in admixture with non-toxic pharmaceutically acceptable excipients may also he manufactured by known methods. The excipients used may be, for example, (1) inert diluents, such as calcium carbonate, lactose, calcium phosphate, sodium phosphate, and the like; (2) granulating and disintegrating agents, such as corn starch, potato starch, alginic acid, and the like; (3) binding agents, such as gum tragacanth, corn starch, gelatin, acacia, and the like; and (4) lubricating agents, such as magnesium stearate, stearic acid, talc, and the like. The tablets may be uncoated or they may be coated by known techniques to delay disintegration and absorption in the gastrointestinal tract, thereby providing sustained action over a longer period. For example, a time delay material such as glyceryl monostearate or glyceryl distearate may be employed. The tablets may also be coated by the techniques described in the U.S. Pat. Nos. 4,256,108; 4,160,452; and 4,265,874, incorporated herein by this reference, to form osmotic therapeutic tablets for controlled release.

[0055] When formulations for oral use are in the form of hard gelatin capsules, the active ingredients may be mixed with an inert solid diluent, for example, calcium carbonate, calcium phosphate, kaolin, or the like. They may also be in the form of soft gelatin capsules wherein the active ingredients are mixed with water or an oil medium, for an example, peanut oil, liquid paraffin, olive oil and the like,

[0056] The pharmaceutical compositions may be in the form of a sterile injectable suspension. Such a suspension may be formulated according to known methods using suitable dispersing or wetting agents and suspending agents. The sterile injectable preparation may also be a sterile injectable solution or suspension in a non-toxic parenterally-acceptable excipient, diluent, or solvent, for example, as a solution in 1,4-butanediol. Sterile, fixed oils are conventionally employed as a solvent or suspending medium. For this purpose, any bland fixed oil may be employed including synthetic mono- or diglycerides, fatty acids (including oleic acid), naturally occurring vegetable oils like sesame oil, coconut oil, peanut oil, cottonseed oil, etc., or synthetic fatty vehicles like ethyl oleate or the like. Buffers, preservatives, antioxidants, and the like can be incorporated as required.

[0057] In addition, sustained release systems, including semi-permeable polymer matrices in the form of shaped articles (e.g., films or microcapsules) can also be used for the administration of the active compound employed herein.

[0058] In accordance with another aspect of the present invention, there are provided methods for the treatment of a subject having diabetes mellitus, said method comprising administering to said subject an effective amount of a composition comprising metformin and one or more of a bioavailable source of chromium, vanadium, or magnesium, or a pharmaceutically acceptable salt thereof, and a physiologically acceptable carrier. All combinations, sources and amounts of the active ingredients discussed herein in conjunction with the compositions of the present invention are contemplated as being administered in accordance with the methods disclosed herein.

[0059] As will be appreciated by those of skill in the art, diabetes presents a complicated array of conditions and symptoms including abnormal glucose metabolism, insulin resistance, hyperinsulinemia, hyperglycemia, hypertriglyceridemia, elevated LDL, lowered HDL and elevated blood pressure. Because of the interrelatedness of these conditions and symptoms, invention compositions are useful in treating many of them.

### Isolated Nucleic Acid Molecules, and Variants and Fragments Thereof

[0060] In an aspect, the disclosure provides for isolated or recombinant nucleic acid molecules comprising nucleotide sequences encoding proteins described herein, for example, SEQ ID NOs: 1-438. In another aspect, the disclosure provides for isolated or recombinant nucleic acid molecules comprising nucleotide sequences encoding proteins described herein, for example, SEQ ID NOs: 1-173 or SEQ ID NOs: 174-438.

[0061] In an aspect, proteins of the present invention are encoded by a nucleotide sequence. In an aspect, the disclosure provides for a nucleotide sequence encoding an amino acid sequence that has at least about 60% about 65%, about 70% about 75%, about 80% about 85%, about 90%, about 91%, about 92%, about 93%, about 94%, about 95%, about 96%, about 97%, about 98%, about 99% or greater sequence identity to SEQ ID NOs: 1-438. In another aspect, proteins of the present invention are encoded by a nucleotide sequence. In an aspect, the disclosure provides for a nucleotide sequence encoding an amino acid sequence that has at least about 60% about 65%, about 70% about 75%, about 80% about 85%, about 90%, about 91%, about 92%, about 93%, about 94%, about 95%, about 96%, about 97%, about 98%, about 99% or greater sequence identity to SEQ ID NOs: 1-173 or SEQ NOs: 174-438.

[0062] The skilled artisan will further appreciate that changes can be introduced by mutation of the nucleotide sequences of the invention thereby leading to changes in the amino acid sequence of the encoded proteins, without altering the biological activity of the proteins. Thus, variant isolated nucleic acid molecules can be created by introducing one or more nucleotide substitutions, additions, or deletions into the corresponding nucleotide sequence disclosed herein, such that one or more amino acid substitutions, additions or deletions are introduced into the encoded protein. Mutations can be introduced by standard techniques, such as site-directed mutagenesis and PCR-mediated mutagenesis. Such variant nucleotide sequences are also encompassed by the present invention.

[0063] For example, conservative amino acid substitutions may be made at one or more, predicted, nonessential amino acid residues. A “nonessential” amino acid residue is a residue that can be altered from the wild-type sequence of a protein described herein without altering the biological activity, whereas an “essential” amino acid residue is required for biological activity. A “conservative amino acid substitution” is one in which the amino acid residue is replaced with an amino acid residue having a similar side chain. Families of amino acid residues having similar side chains have been defined in the art. These families include amino acids with basic side chains . lysine, arginine, histidine), acidic side chains (e.g., aspartic acid, glutamic acid), uncharged polar side chains (e.g., glycine, asparagine, glutamine, serine, threonine, tyrosine, cysteine), nonpolar side chains (e.g., alanine, valine, leucine, isoleucine, proline, phenylalanine, methionine, tryptophan.), beta-branched side chains (e.g., threonine, valine, isoleucine)and aromatic side chains (e.g., tyrosine, phenylalanine, tryptophan, histidine).

[0064] Amino acid substitutions may be made in nonconserved regions that retain function. In general, such substitutions would not be made for conserved amino acid residues, or for amino acid residues residing within a conserved motif, where such residues are essential for protein activity. Examples of residues that are conserved and that may be essential for protein activity include, for example, residues that are identical between all proteins contained in an alignment of similar or related toxins to the sequences of the invention (e.g., residues that are identical in an alignment of homologous proteins). Examples of residues that are conserved but that may allow conservative amino acid substitutions and still retain activity include, for example, residues that have only conservative substitutions between all proteins contained in an alignment of similar or related toxins to the sequences of the invention (e.g., residues that have only conservative substitutions between all proteins contained in the alignment homologous proteins). However, one of skill in the art would understand that functional variants may have minor conserved or nonconserved alterations in the conserved residues.

### Isolated Proteins and Variants and Fragments Thereof

[0065] “Fragments” or “biologically active portions” include protein fragments comprising amino acid sequences sufficiently identical to the amino acid sequence set forth in SEQ ID NOs: 1-438, and that exhibit, for example, anti-diabetic activity.

[0066] By “variants” is intended proteins having an amino acid sequence that is at least about 60%, 63%, about 70%, 75%, about 80%, 85%, about 90%, 91%, 92%, 93%, 94%, 95%, 96%, 97%, 98% or 99% identical to the amino acid sequence of any of SEQ ID NOs: 1-173, SEQ ID NOs: 174-438; or SEQ ID NOs: 1-438. Variants include proteins that differ in amino acid sequence due to mutagenesis. Variant proteins encompassed by the present invention are biologically active, that is they continue to possess the desired biological activity of the native protein, that is, retaining anti diabetic activity. In some embodiments, the variants have improved activity relative to the native protein.

[0067] In various embodiments of the present invention, anti-diabetic proteins include amino acid sequences that are shorter than the full-length sequences due to the use of an alternate downstream start site.

[0068] Antibodies to the proteins of the present invention, or to variants or fragments thereof are also encompassed. Methods for producing antibodies are well known in the art (see, for example, Harlow and Lane (1988) Antibodies: A Laboratory Manual, Cold Spring Harbor Laboratory, Cold Spring Harbor, NY; U.S. Pat. No. 4,196,265).

[0069] Thus, one aspect of the invention concerns antibodies, single-chain antigen binding molecules, or other proteins that specifically bind to one or more of the protein or protein molecules of the invention and their homologs, fusions or fragments. In a particularly preferred embodiment, the antibody specifically binds to a protein having the amino acid sequence set forth in SEQ ID NOs: 1-438 or a fragment thereof. In another embodiment, the antibody specifically binds to a fusion protein comprising an amino acid sequence selected from the amino acid sequence set forth in SEQ ID NOs: 1-438 or a fragment thereof.

[0070] Antibodies of the invention may be used to quantitatively or qualitatively detect the protein or protein molecules of the invention, or to detect post translational modifications of the proteins. As used herein, an antibody or protein is said to “specifically bind” to a protein or protein molecule of the invention if such binding is not competitively inhibited by the presence of non-related molecules.

[0071] The antibodies of the invention may be contained within a kit useful for detection of the protein or protein molecules of the invention. The invention further comprises a method of detecting the protein or protein molecule of the invention (particularly a protein encoded by the amino acid sequence set forth in SEQ ID NOs: 1-438, including variants or fragments thereof that are capable of specifically binding to the antibody of the invention) comprising contacting a sample with the antibody of the invention and determining whether the sample contains the protein or protein molecule of the invention. Methods for utilizing antibodies for the detection of a protein or protein of interest are known in the art.

### Altered or Improved Variants

[0072] It is recognized that DNA sequences of a protein may be altered by various methods, and that these alterations may result in DNA sequences encoding proteins with amino acid sequences different than that encoded by a protein of the present invention. This protein may be altered in various ways including amino acid substitutions, deletions, truncations, and insertions of one or more amino acids of SEQ ID NOs: 1-438, including up to about 2, about 3, about 4, about 5, about 6, about 7, about 8, about 9, about 10, about 15, about 20, about 25, about 30, about 35, about 40, about 45, about 50, about 55, about 60, about 65, about 70, about 75, about 80, about 85, about 90, about 100, about 105, about 110, about 115, about 120, about 125, about 130, about 135, about 140, about 145, about 150, about 155, or more amino acid substitutions, deletions or insertions. Methods for such manipulations are generally known in the art. For example, amino acid sequence variants of a protein can be prepared by mutations in the DNA. This may also be accomplished by one of several forms of mutagenesis and/or in directed evolution. In some aspects, the changes encoded in the amino acid sequence will not substantially affect the function of the protein. Such variants will possess the desired anti-diabetic activity.

[0073] Alternatively, alterations may be made to the protein sequence of many proteins at the amino or carboxy terminus without substantially affecting activity. This can include insertions, deletions, or alterations introduced by modem molecular methods, such as PCR, including PCR amplifications that alter or extend the protein coding sequence by inclusion of amino acid encoding sequences in the oligonucleotides utilized in the PCR amplification. Alternatively, the protein sequences added can include entire protein-coding sequences, such as those used commonly in the art to generate protein fusions. Such fusion proteins arc often used to (1) increase expression of a protein of interest (2) introduce a binding domain, enzymatic activity, or epitope to facilitate either protein purification, protein detection, or other experimental uses known in the art (3) target secretion or translation of a protein to a subcellular organelle, such as the periplasmic space of Gram-negative bacteria, or the endoplasmic reticulum of eukaryotic cells, the latter of which often results in glycosylation of the protein.

### Theory of Operation

[0074] In healthy subjects, insulin is the substance that regulates glucose uptake. But in diabetic subjects, insulin no longer performs that role effectively (due to either inadequate levels of insulin or insulin resistance). It has been determined that a substance referred to herein as “factor X” can be used to resolve type II diabetes.

[0075] While not wishing to be bound by theory, the following is one possible explanation of the mechanism of action of the disclosed invention. The inventor theorizes that certain cells in the body, referred to herein as “BLC” (which stands for beta-like cells) can be induced to secrete either insulin or an insulin-like material (“ILM”) in response to high levels of glucose. Note that while the location of the BLC within the body has not yet been identified, knowledge of their location is not necessary to obtain the results described herein.

[0076] More specifically, before the BLC are exposed to factor X, the BLC are dormant or inactivated, in which case they do not secrete insulin or ILM or secrete an insufficient amount of insulin or ILM. But after exposure to factor X, the BLC become activated, and will begin to secrete insulin or ILM in response to high levels of glucose. One possible mechanism of action is that exposure to factor X causes the BLC to secrete insulin and/or ILM in response to high levels of glucose. Another possible mechanism of action is that the BLC are naturally programmed to secrete insulin and/or ILM in response to high levels of glucose, but an unknown substance that deactivates the BLC is ordinarily present. Under this scenario, factor X neutralizes (e.g., switches off) this normally prevailing deactivation substance.

[0077] In either scenario, once the BLC have been activated, the BLC will sense the level of glucose in the blood, and will initiate the production of insulin or ILM at levels that correspond to the level of glucose in the blood (so that higher levels of glucose will result in the production of more insulin or ILM). This production of insulin or ILM may occur either directly in the BLC themselves or indirectly (e.g. through the action of other cells). The insulin or ILM circulates in the blood.

[0078] Another possible explanation of the mechanism of action of the disclosed invention is that exposure to factor X improves conventional beta cells' ability to regulate the glucose levels in a subject's body, or downregulates/turns off another mechanism that prevents the conventional beta cells from properly regulating glucose levels.

[0079] Under either explanation, factor X is ordinarily either not present (at least in sufficient quantities) or switched off in diabetic animals that have not undergone RYGB. But bariatric surgery (e.g., RYGB) results in the appearance or upregulation of factor X in the blood of those animals, which ultimately resolves those animals' diabetes. And most notably, when factor X is obtained from the blood of the post-RYGB animals (whose diabetes has been resolved) and subsequently injected into other diabetic animals (that have not undergone RYGB), the diabetes of the latter animals was also resolved. This indicates that factor X can be used as a non-surgical treatment for diabetes.

[0080] The first step in testing this theory was inducing diabetes mellitus in adult pigs using STZ to destroy the beta cells of the pancreas, and subsequently performing RYGB on those pigs. FIG. 1 depicts the blood glucose levels during this experiment for a set of pigs. Even though their pancreas beta cells were destroyed, the glucose level in these post-RYGB pigs dropped significantly within days following RYGB operation and remained low for the duration of the experiment. Numerically, the blood glucose level dropped from 448 mg/dl pre-operation to 200 mg/dl post-operation, with a P-value of <0.01 (n=7). In addition, the C-peptide concentration increased from 0 pM pre-operation to 39 pM post-operation, with a P-value of <0.01 (n=7). These values indicate behavior that is more like that of normal pigs as opposed to diabetic pigs, indicating that the pigs' diabetes was resolved.

[0081] The inventor refers to the substance responsible for the normalization of the glucose levels in these post-RYGB pigs as “factor X” herein. Blood samples were extracted from these post-RYGB pigs for further testing as described below and to isolate factor X, after which the pigs were sacrificed.

[0082] The animal procedures that were followed to harvest blood samples that contained factor X are reproduced below in Appendix A. To summarize those procedures, adult pigs were treated with streptozotocin (STZ) to destroy their pancreas, and fasting blood glucose level was monitored until steady diabetes was present. Then, RYGB was performed on the adult pigs, and their blood glucose was monitored daily up to 7 days until normal glucose levels were restored. Most of the pig's Blood was then withdrawn from the post-RYGB adult pigs into serum separator tubes and the pigs were then sacrificed.

[0083] Tests on the blood samples that were extracted from the pigs showed either no insulin or only small quantities of insulin in the plasma. This indicates either that ILM circulating in the pig's blood (and not insulin) that was influencing/regulating glucose levels (and/or glucose/carbohydrate metabolism) or that factor X enhanced the efficacy of insulin, or both.

[0084] The blood samples were processed into a serum (referred to herein as “full serum”) as described below in Appendix B. And after inducing diabetes into a set of piglets using STZ, additional experiments were performed on the diabetic piglets.

[0085] FIGS. 2A and 2B depict the results of one experiment in which the full serum was injected to diabetic piglets. For both the FIG. 2A piglet and the FIG. 2B piglet, the blood glucose level dropped significantly a few days after injection of the full serum, and remained low for the duration of the experiment. This data indicates that factor X was present in the full serum, and that factor X can be used as an injectable treatment for diabetes.

[0086] Additional experiments were also performed by separating the full serum into fractions using two alternative fractionation procedures (cation exchange chromatography and size exclusion chromatography) described below in Appendix B, and the efficacy of the various fractions obtained were tested.

[0087] FIG. 3 depicts the separation of the full serum using cation exchange fractionation on HiTrap SP HP 5 ml column (GE Healthcare) into three fractions labeled A, B, and C. Each of those three fractions was then tested by injecting the respective fraction into diabetic piglets who had not undergone RYGB. FIG. 4 depicts how the blood glucose levels changed over time in response to injection of each of these three fractions. A review of this data reveals that fraction C was the most effective in reducing the blood glucose level to the point that the diabetes appears to be resolved, and that the reduction persisted through 17 days after injection. This data indicates that factor X (plus additional proteins) was present in fraction C from the cation exchange process fractionation.

[0088] FIG. 5 depicts the separation of the full serum using a HiLoad Superdex 75 PG (GE Healthcare) gel filtration process into four fractions labeled A, B, C, and D. Each of those four fractions was then tested by injecting the respective fraction into diabetic piglets who had not undergone RYGB. FIG. 6 depicts how the blood glucose levels changed over time in response to injection of each of these four fractions. A review of this data reveals that fraction B was the most effective in reducing the blood glucose level to the point that the diabetes appears to be resolved and that the reduction persisted through 17 days after injection. This data indicates that factor X (plus additional proteins) was present in fraction B from the Superdex-75 gel filtration process fractionation.

[0089] Fraction C from the cation exchange process and fraction B from the Superdex-75 gel filtration process are referred to herein as eluate I and eluate II, respectively. Collectively, this data indicates that a single injection of a serum or eluate that includes factor X provides significant resolution of diabetes, with a very long-lasting duration (at least on the order of two weeks).

[0090] To confirm these results, beta cell insulin secretion tests were performed using the full serum diluted 1:4, 1:10, and 1:20; and using fractions B and C from the cation exchange process, each diluted 1:4, 1:10, and 1:20. FIG. 7 depicts these results, which confirm that fraction C from the cation exchange process was the most effective. Beta cell insulin secretion tests were also performed using a control, active GLP-1 (a compound known to boost insulin secretion), and fraction C from the cation exchange process. FIG. 8 depicts these results, which show that fraction C from the cation exchange process was the most effective.

[0091] A first set of relevant porcine proteins was identified using mass spectrometry from the two active fractions (i.e., fraction C of the cation exchange process and fraction B of the Superdex-75 gel filtration process). And a second set of relevant proteins was identified by finding the human counterparts of the first set of porcine proteins.

[0092] Without being bound by theory, from this work it was concluded that (a) factor X is not ordinarily present (at least in sufficient quantities) to control diabetes in diabetic subjects that have not undergone RYGB or other types of bariatric surgery; and (h) introducing factor X into diabetic subjects is an effective way of obtaining long-lasting control of diabetes in those subjects.

[0093] Additional tests were then performed and are still ongoing to narrow down which protein was responsible for the resolution of the piglets' diabetes. In one such test, recombinant human IGF-2 (“rhIG-2”) was injected intravenously into two diabetic pigs, and the effect on glucose levels was monitored. More specifically, a single intravenous injection (500 ug) of rhIGF-2 was injected into a 16 kg, Delta-4 pig and a 9 kg AH-1 pig. The difference in weight of those two pigs corresponded to two different dosages (30 μg/kg and 55 μg/kg). FIGS. 9A and 9B depict the resulting change in those pigs' glucose levels over time, and the data in those figures show that hIGF-2 administered to pigs result in glucose levels returning to normal levels (relative to pre-treatment levels). It is important to note that while FIGS. 9A and 9B depict dramatic improvements in the blood glucose levels of two particular pigs, when similar tests were performed on other pigs, the other pigs' diabetes was not resolved. Further investigation into why the treatment was effective for some of the pigs and not others will be required.

[0094] Further study of the anti-diabetic activity of IGF-2 revealed inhibition of insulin/IGF receptor family using Tocris GSK1838705 inhibitor (#5111) in vitro. More specifically, testing revealed that adding an IGF receptor inhibitor reduced glucose uptake relative to insulin alone from 7500 to 1300 Em. (540 nm) and relative to a post-RYGB serum alone from 15500 to 4500 Em. (540 nm), which provides additional evidence that IGF-2 can be responsible for the reduction in glucose in certain circumstances. Similarly, adding an IGF-2 blocking antibody also reduced glucose uptake relative to post-RYGB serum alone from 13500 to 3000 Em. (540 nm), which confirms the same point. Finally, rhIGF-2 was compared to insulin in a glucose uptake assay at concentrations of 10, 100, and 1000 nM. The data for the insulin at those three concentrations was 7000, 8000, and 8500 Em. (540 nm), respectively; and the data for the rhIGF-2 at those three concentrations was 2000, 4000, and 7600 Em. (540 nm), respectively, indicating that high concentrations of rhIGF-2 increases glucose uptake to a similar extent as insulin.

[0095] Mass spec analysis and Western blot analysis confirmed that IGF-2 was present in both of the active fractions and in the full serum, and that the level of IGF-2 complex in pigs increased after the RYGB operation.

[0096] In additional testing, was found to stimulate insulin release from MIN6 beta cell line. Transgenic C57BL/6 mouse insulinoma cell line (MIN6) cells originate from a transgenic C57BL/6 mouse insulinoma expressing an insulin-promoter/T-antigen construct. MIN-6 cells express GLUT-2 and glucokinase and respond to glucose within the physiological range in the presence of nicotinamide (Miyazaki et al., 1990).

[0097] To measure insulin secretion in response to factor-X, MIN6 cells were plated in 24-well culture plates at 3×105 cells/well. After 48 hr, cells were washed twice and preincubated in serum free medium (DMEM 25 mM glucose. 2 mM 1-glutamine, and 1 mM sodium pyruvate) for 1 hr. Following pre-incubation step, factor-X induction performed by culturing cells for 3 hr with 500 μl of serum free medium supplemented with 5% post RYGB serum/fractions. Finally, induction medium was replaced with new 500 μl of serum free medium for 3 hr and collected (stored at −20° C. until assayed) for insulin ELISA analysis (Mercodia Mouse Insulin ELISA #10-1247-01).

[0098] FIG. 10 shows that rIGF-2 and AH-2 post-operation serum elevate insulin secretion from beta cells in vitro. In FIG. 10 the bars in the second grouping represent beta cells induction with recombinant human IGF-2, and the bars on the right side of the final four groupings represent 3 days post operation serum. FIG. 11 contains additional data (from experiment “Delta-6”) showing that delta-6 post-operation pig serum elevates insulin secretion from beta cells in vitro. Here again, the bars on the right side of each grouping represent three days post operation serum. In both FIGS. 10 and 11, 5% of the pre-operation serum or post-operation serum was diluted in a serum free medium with 3 hr of incubation. Collection of cultured medium for analysis was done using 3 hr incubation with new 0.5 mL serum free medium.

[0099] 438 individual aspects of the invention correspond, respectively, to each of the 438 SEQ ID NOs that appear on tables 1 and 2. For each of those SEQ ID NOs, the respective aspect of the invention provides for a pharmaceutical composition including a protein with an amino acid sequence at least 95% identical to the respective SEQ ID NO and a pharmaceutically acceptable excipient. In any of these 438 aspects, the amino acid sequence of the protein may optionally be at least 98% identical or at least 99% identical to the respective SEQ ID NO.

[0100] Another 438 individual aspects of the invention correspond, respectively, to each of the 438 SEQ NOs that appear on tables 1 and 2. For each of those SEQ ID NOs, the respective aspect of the invention provides for a method of treating diabetes in a patient in need thereof comprising administering an effective amount of a pharmaceutical composition including a protein with an amino acid sequence at least 95% identical to the respective SEQ ID NO and a pharmaceutically acceptable excipient. In any of these 438 aspects, the amino acid sequence of the protein may optionally be at least 98% identical or at least 99% identical to the respective SEQ ID NO.

[0101] Another aspect of the invention provides a pharmaceutical composition according any of the aspects described above for use in the treatment of diabetes, abnormal insulin resistance, abnormal blood glucose level, abnormal insulin level, hyperinsulinemia, glycosylated hemoglobin level, or a combination thereof.

[0102] Another aspect of the invention provides a pharmaceutical composition according to any of the aspects described above for use as a medicament.

[0103] Another aspect of the invention provides one or more proteins selected from the group consisting of an amino acid sequence at least 95%, at least 96%, at least 97%, at least 98%, at least 99% or 100% identical to one of SEQ ID NOs: 1-438 for use as a medicament.

[0104] Another aspect of the invention provides one or more proteins selected from the group consisting of an amino acid sequence at least 95%, at least 96%, at least 97%, at least 98%, at least 99% or 100% identical to one of SEQ ID NOs: 1-438 for use in the treatment of diabetes, abnormal insulin resistance, abnormal blood glucose level, abnormal insulin level, hyperinsulinemia, glycosylated hemoglobin level, or a combination thereof.

[0105] Another aspect of the invention provides a pharmaceutical composition comprising IGF-2 or a variant thereof for use as a medicament.

[0106] Another aspect of the invention provides a pharmaceutical composition comprising IGF-2 or a variant thereof for use in the treatment of diabetes, abnormal insulin resistance, abnormal blood glucose level, abnormal insulin level, hyperinsulinemia, glycosylated hemoglobin level, or a combination thereof.

[0107] References cited in this disclosure are incorporated herewith in their entirety.

[0108] While the present invention has been disclosed with reference to certain embodiments, numerous modifications, alterations, and changes to the described embodiments are possible without departing from the sphere and scope of the present invention, as defined in the appended claims. Accordingly, it is intended that the present invention not be limited to the described embodiments, but that it has the full scope defined by the language of the following claims, and equivalents thereof.

### APPENDIX A: Animal Procedures

[0109] The following procedure was used to harvest blood samples containing factor X.

### Acclimation of Pigs:

[0110] The pigs are housed individually under standardized conditions (19-23° C.; 40-70% relative humidity; 12:12 hour day/night cycle).

### Cannulation:

[0111] After acclimation, the pigs undergo surgery, which consists of an indwelling silicon catheter into the jugular vein under aseptic conditions. In brief, after an overnight fast, preoperative intramuscular (I.M) ketamine (20 mg/kg) +xylazine (2 mg/kg) is injected, and then insertion of catheter (Venflon) into the ear vein and injection of midazolam intravenously (I.V). Before the procedure, the pigs are injected with Ceforal 1 gr I.M and Dipyrone 1 gr I.M.

[0112] The pigs are intubated and general anesthesia maintained with isoflurane vaporized in oxygen. The concentration of isoflurane (1-2.5%) continuously adjusted to achieve an adequate depth of anesthesia. The silicon catheter is inserted into the jugular vein. After recovery from the surgical procedure, Ceforal I gr I.M is given twice a day for seven consecutive days and Dipyrone 1 gr I.M and buprenorphine (0.1 mg/kg) I.M for the initial three days. The catheters are used for I.V. medication and blood sampling.

### Intravenous Glucose Tolerance Test (IVGTT):

[0113] IVGTT is performed. A standard technique is applied: After 12 h fasting, awake animals are infused with 0.5 g/kg of dextrose (10%) UV via the central venous access. Blood glucose is measured using a glucometer before the injection of dextrose to establish a baseline recording (Time 0) as well as 5, 10, 15, 30, 45, 60, 90, and 120 min after administration of dextrose.

### Induction of Diabetes Mellitus by STZ:

[0114] Prior to STZ injection, pigs are orally administered 50 g sugar dissolved in 50 ml water via feeding tube (zonda) or PO and with 10% dextrose (0.5gr/Kg BW) via I.V. Blood glucose level is measured using a commercial glucometer. When glucose level drops by a third, approximately 5-vacutainer tubes blood are drawn into serum separator tubes.
[0115] Incubate the tubes for 30 minutes at room temperature.
[0116] Centrifuge at 1250 g for 10 minutes at RT (room temperature).
[0117] Collect the supernatant and pipette 5×1 ml aliquots in 1.5 nil tubes, and 6×5 ml aliquots in 15 ml tubes.
[0118] Freeze at −80° C.

[0119] Due to the short half-life of STZ, STZ dissolves immediately prior to the procedure with 100 mmol/L cold sodium citrate buffer solution, pH 4.5 at a final STZ concentration of 80 mg/mL.
[0120] Dissolve STZ in the Na-Citrate buffer
[0121] Vortex until STZ is completely in solution.
[0122] Filter-sterilize (0.45 μm)

[0123] The dissolved STZ is administered I.V. within 5 minutes, the total amount of STZ administered per individual is 150 mg/kg BW. At the end of the procedure, the animals are monitored for blood glucose concentrations by means of test strips during wakeup and for 13 hours post STZ injection to avoid hypoglycemia due to insulin release by the destroyed beta cells. Hypoglycemia is promptly treated with an I.V. bolus of glucose at 0.5 g/kg BW.

[0124] Blood glucose level is measured at least twice a day (every day until sacrifice) using a commercial glucometer—at the beginning (fasting) and at the end (after meal) of the day. Clinical examinations performed at least once daily throughout the study. Pigs are observed until stable hyperglycemic (2 weeks). One day before RYGB operation, IVGTT is performed.

### Roux-en-Y Gastric Bypass Operation (RYGB):

[0125] Pigs are operated through an upper midline incision under general anesthesia. The gastric pouch (˜30 ml) is constructed using linear staplers (GIA80, blue cartridges, Covidien, Mansfield, Mass.). The stomach is divided horizontally, 6 cm from the gastro-esophageal transition (4 cm staple length). With a second stapler, the stomach is vertically completely divided, ending close to the esophagus. The small intestine (total length: 600 cm) is followed from cecumand proximally to the duodeno-jejunal transition. Seventy centimeters from the duodeno-jejunal junction, the intestine is divided using a GIA-staple device as above, and a. hand-sewn side-to-side anastomosis using continuous 4-0 monofilament absorbable suture is made 150 cm further distally. The jejunal end of the Roux limb (alimentary limb) is brought up and anastomosed to the lowest part of the gastric pouch by a linear stapler and completed by continuous monofilament absorbable suture 0-4.

### Follow-Lip Atter Surgery:

[0126] Blood glucose level is measured at least twice a day (every day until sacrifice) using a commercial glucometer—at the beginning (fasting) and at the end (after meal) of the day. When glucose concentration reaches normal levels, IVGTT is performed (see Intravenous Glucose Tolerance Test above)

### Blood Extraction and Sacrifice:

[0127] Sacrifice is performed about 14-21 days post RYGB operation, after blood glucose level have reached normal levels, using the following procedure:
[0128] Pigs are kept fasting overnight.
[0129] The animals are anaesthetized.
[0130] 50 g sugar dissolved in 50 ml water is orally infused via feeding tube (zonda).
[0131] 10% Dextrose (0.5 gr/kg BW) is administrated I.V. to stimulate the secretion of anti-diabetic factors.
[0132] Blood glucose level is measured using a commercial glucometer.
[0133] When glucose level drops to ⅔ of the peak-or after 30 min, maximum volume of blood samples is withdrawn into serum separator tubes.
[0134] The animal is then sacrificed.

### APPENDIX B: Purification Procedures:

[0135] The blood samples that were extracted from the pigs were prepared using the following procedure:
[0136] Blood is incubated for 30 minutes at room temperature.
[0137] Blood is centrifuged at 1250 g for 10 minutes at room temperature.
[0138] The supernatant (serum) is collected, aliquoted and frozen at −80° C.

[0139] The resulting serum was then purified and separated into different fractions using the fractionation approaches described below.

### Fractionation by Cation Exchange Chromatography:

[0140] The serum is subjected to buffer exchange on Sephadex G25 using MES buffer. The MES buffered serum is subjected to strong cation exchange fractionation on HiTrap SP HP 5 ml column (GE Healthcare j using the following steps:
[0141] Sample application;
[0142] Wash in MES buffer with 168 mM KCl
[0143] Elution in MES buffer with 445 mM HCl.

[0144] The resulting elution fraction contains factor X activity.

### Fractionation by Size Exclusion Chromatography:

[0145] The serum is subjected to size exclusion chromatography on HiLoad. Superdex 75 PG (GE Healthcare). The material eluting 50-55 ml after sample application also contains factor X activity.

### Buffer Compositions:

[0146] PBS, pH 7.4 (Biological Industries (12-023-5A)

| Material | Concentration (mM) |
|---|---|
| KCl | 2.7 |
| KH₂PO₄ | 1.5 |
| NaCl | 137 |
| Na₂HPO₄ | 8.1 |

[0147] MES buffer, pH 5.5

| Material | Concentration (mM) |
|---|---|
| MES | 25 |
| KCl | 75 |

1. A pharmaceutical composition comprising:
one or more proteins selected from the group consisting of an amino acid sequence at least 95% identical to one of SEQ ID NOs: 1-438; and
a pharmaceutically acceptable excipient.

2. The pharmaceutical composition of claim 1, wherein each of the one or more proteins selected from the group is at least 98% identical to a respective one of SEQ ID NOs: 1-438.

3. A pharmaceutical composition comprising:
The pharmaceutical composition of claim 1, wherein each of the one or more proteins selected from the group at least 99% identical to a respective one of SEQ ID NOs: 1-438.

4. The pharmaceutical composition of claim 1, wherein said composition comprises only one of said proteins.

5. The pharmaceutical composition of claim 1, wherein said composition comprises only two of said proteins.

6. The pharmaceutical composition of claim 1, wherein said composition comprises only three of said proteins.

7. The pharmaceutical composition of claim 1, wherein said composition comprises only four of said proteins.

8. The pharmaceutical composition of claim 1, wherein said composition comprises five or more of said proteins.

9. The pharmaceutical composition of claim 1, wherein said one or more proteins are selected from the group consisting of SEQ ID NOs: 1-173.

10. The pharmaceutical composition of claim 1, wherein said one or more proteins are selected from the group consisting of SEQ ID NOs: 174-438.

11-26. (canceled)

27. A method of treating diabetes, abnormal insulin resistance, abnormal blood glucose level, abnormal insulin level, hyperinsulinemia, glycosylated hemoglobin level, or a combination thereof, the method comprising:
administering a pharmaceutical composition comprising one or more proteins to a patient in need thereof, wherein said one or more proteins are selected from the group consisting of an amino acid sequence at least 95% identical to one of SEQ ID NOs: 1-438.

28. The method of claim 27, wherein said composition comprises only one of said proteins.

29. The method of claim 27, wherein said composition comprises only two of said proteins.

30. The method of claim 27, wherein said composition comprises three or more of said proteins.

31. The method of claim 27, wherein said patient has not undergone bariatric surgery.

32. The method of claim 27, wherein said one or more proteins are selected from the group consisting of SEQ ID NOs: 1-173.

33. The method of claim 27, wherein said one or more proteins are selected from the group consisting of SEQ ID NOs: 174-438.

34.-64. (canceled)

65. A method of treating diabetes, abnormal insulin resistance, abnormal blood glucose level, abnormal insulin level, hyperinsulinemia, glycosylated hemoglobin level, or a combination thereof, the method comprising:
obtaining a serum by (1) inducing diabetes in a pig, (2) subsequently performing gastric bypass surgery on the pig, (3) subsequently waiting for the pig's glucose level to normalize, (4) subsequently extracting blood from the pig, (5) and processing the extracted blood into a serum; and
administering the serum to a patient in need thereof.

66. The method of claim 65, wherein the gastric bypass surgery comprises RYGB.

The application's sequence listing, which the Patent Office published only in electronic form, follows.

SEQUENCE LISTING (438 sequences)

SEQ ID NO: 1 - protein, 747 aa, Homo sapiens
MRRCNSGSGPPPSLLLLLLWLLAVPGANAAPRSALYSPSDPLTLLQADTVRGAVLGSRSAWAVEFFASWCGHCIAFAPTWKALAEDVKAWRPALYLAALDCAEETNSAVCRDFNIPGFPTVRFFKAFTKNGSGAVFPVAGADVQTLRERLIDALESHHDTWPPACPPLEPAKLEEIDGFFARNNEEYLALIFEKGGSYLGREVALDLSQHKGVAVRRVLNTEANVVRKFGVTDFPSCYLLFRNGSVSRVPVLMESRSFYTAYLQRLSGLTREAAQTTVAPTTANKIAPTVWKLADRSKIYMADLESALHYILRIEVGRFPVLEGQRLVALKKFVAVLAKYFPGRPLVQNFLHSVNEWLKRQKRNKIPYSFFKTALDDRKEGAVLAKKVNWIGCQGSEPHFRGFPCSLWVLFHFLTVQAARQNVDHSQEAAKAKEVLPAIRGYVHYFFGCRDCASHFEQMAAASMHRVGSPNAAVLWLWSSHNRVNARLAGAPSEDPQFPKVQWPPRELCSACHNERLDVPVWDVEATLNFLKAHFSPSNIILDFPAAGSAARRDVQNVAAAPELAMGALELESRNSTLDPGKPEMMKSPTNTTPHVPAEGPEASRPPKLHPGLRAAPGQEPPEHMAELQRNEQEQPLGQWHLSKRDTGAALLAESRAEKNRLWGPLEVRRVGRSSKQLVDIPEGQLEARAGRGRGQWLQVLGGGFSYLDISLCVGLYSLSFMGLLAMYTYFQAKIRALKGHAGHPAA

SEQ ID NO: 2 - protein, 326 aa, Homo sapiens
MELSGATMARGLAVLLVLFLHIKNLPAQAADTCPEVKVVGLEGSDKLTILRGCPGLPGAPGPKGEAGVIGERGERGLPGAPGKAGPVGPKGDRGEKGMRGEKGDAGQSQSCATGPRNCKDLLDRGYFLSGWHTIYLPDCRPLTVLCDMDTDGGGWTVFQRRMDGSVDFYRDWAAYKQGFGSQLGEFWLGNDNIHALTAQGSSELRVDLVDFEGNHQFAKYKSFKVADEAEKYKLVLGAFVGGSAGNSLTGHNNNFFSTKDQDNDVSSSNCAEKFQGAWWYADCHASNLNGLYLMGPHESYANGINWSAAKGYKYSYKVSEMKVRPA

SEQ ID NO: 3 - protein, 347 aa, Homo sapiens
MALLFSLILAICTRPGFLASPSGVRLVGGLHRCEGRVEVEQKGQWGTVCDDGWDIKDVAVLCRELGCGAASGTPSGILYEPPAEKEQKVLIQSVSCTGTEDTLAQCEQEEVYDCSHDEDAGASCENPESSFSPVPEGVRLADGPGHCKGRVEVKHQNQWYTVCQTGWSLRAAKVVCRQLGCGRAVLTQKRCNKHAYGRKPIWLSQMSCSGREATLQDCPSGPWGKNTCNHDEDTWVECEDPFDLRLVGGDNLCSGRLEVLHKGVWGSVCDDNWGEKEDQVVCKQLGCGKSLSPSFRDRKCYGPGVGRIWLDNVRCSGEEQSLEQCQHRFWGFHDCTHQEDVAVICSG

SEQ ID NO: 4 - protein, 931 aa, Homo sapiens
MDMFPLTWVFLALYFSRHQVRGQPDPPCGGRLNSKDAGYITSPGYPQDYPSHQNCEWIVYAPEPNQKIVLNFNPHFEIEKHDCKYDFIEIRDGDSESADLLGKHCGNIAPPTIISSGSMLYIKFTSDYARQGAGFSLRYEIFKTGSEDCSKNFTSPNGTIESPGFPEKYPHNLDCTFTILAKPKMEIILQFLIFDLEHDPLQVGEGDCKYDWLDIWDGIPHVGPLIGKYCGTKTPSELRSSTGILSLTFHTDMAVAKDGFSARYYLVHQEPLENFQCNVPLGMESGRIANEQISASSTYSDGRWTPQQSRLHGDDNGWTPNLDSNKEYLQVDLRFLTMLTAIATQGAISRETQNGYYVKSYKLEVSTNGEDWMVYRHGKNHKVFQANNDATEVVLNKLHAPLLTRFVRIRPQTWHSGIALRLELFGCRVTDAPCSNMLGMLSGLIADSQISASSTQEYLWSPSAARLVSSRSGWFPRIPQAQPGEEWLQVDLGTPKTVKGVIIQGARGGDSITAVEARAFVRKFKVSYSLNGKDWEYIQDPRTQQPKLFEGNMHYDTPDIRRFDPIPAQYVRVYPERWSPAGIGMRLEVLGCDWTDSKPTVETLGPTVKSEETTTPYPTEEEATECGENCSFEDDKDLQLPSGFNCNFDFLEEPCGWMYDHAKWLRTTWASSSSPNDRTFPDDRNFLRLQSDSQREGQYARLISPPVHLPRSPVCMEFQYQATGGRGVALQVVREASQESKLLWVIREDQGGEWKHGRIILPSYDMEYQIVFEGVIGKGRSGEIAIDDIRISTDVPLENCMEPISAFAGENFKVDIPEIHEREGYEDEIDDEYEVDWSNSSSATSGSGAPSTDKEKSWLYTLDPILITIIAMSSLGVLLGATCAGLLLYCTCSYSGLSSRSCTTLENYNFELYDGLKHKVKMNHQKCCSEA

SEQ ID NO: 5 - protein, 188 aa, Homo sapiens
MFHQIWAALLYFYGIILNSIYQCPEHSQLTTLGVDGKEFPEVHLGQWYFIAGAAPTKEELATFDPVDNIVFNMAAGSAPMQLHLRATIRMKDGLCVPRKWIYHLTEGSTDLRTEGRPDMKTELFSSSCPGGIMLNETGQGYQRFLLYNRSPHPPEKCVEEFKSLTSCLDSKAFLLTPRNQEACELSNN

SEQ ID NO: 6 - protein, 551 aa, Homo sapiens
MSRQSSITFQSGSRRGFSTTSAITPAAGRSRFSSVSVARSAAGSGGLGRISSAGASFGSRSLYNLGGAKRVSINGCGSSCRSGFGGRASNRFGVNSGFGYGGGVGGGFSGPSFPVCPPGGIQEVTVNQSLLTPLHLQIDPTIQRVRAEEREQIKTLNNKFASFIDKVRFLEQQNKVLETKWALLQEQGSRTVRQNLEPLFDSYTSELRRQLESITTERGRLEAELRNMQDVVEDFKVRYEDEINKRTAAENEFVALKKDVDAAYMNKVELEAKVKSLPEEINFIHSVFDAELSQLQTQVGDTSVVLSMDNNRNLDLDSIIAEVKAQYEDIANRSRAEAESWYQTKYEELQVTAGRHGDDLRNTKQEISEMNRMIQRLRAEIDSVKKQCSSLQTAIADAEQRGELALKDARAKLVDLEEALQKAKQDMARLLREYQELMNIKLALDVEIATYRKLLEGEECRLSGEGVSPVNISVVTSTLSSGYGSGSSIGGGNLGLGGGSGYSFTTSGGHSLGAGLGGSGFSATSNRGLGGSGSSVKFVSTTSSSQKSYTH

SEQ ID NO: 7 - protein, 1065 aa, Homo sapiens
MKILILGIFLFLCSTPAWAKEKHYYIGIIETTWDYASDHGEKKLISVDTEHSNIYLQNGPDRIGRLYKKALYLQYTDETFRTTIEKPVWLGFLGPIIKAETGDKVYVHLKNLASRPYTFHSHGITYYKEHEGAIYPDNTTDFQRADDKVYPGEQYTYMLLATEEQSPGEGDGNCVTRIYHSHIDAPKDIASGLIGPLIICKKDSLDKEKEKHIDREFVVMFSVVDENFSWYLEDNIKTYCSEPEKVDKDNEDFQESNRMYSVNGYTFGSLPGLSMCAEDRVKWYLFGMGNEVDVHAAFFHGQALTNKNYRIDTINLFPATLFDAYMVAQNPGEWMLSCQNLNHLKAGLQAFFQVQECNKSSSKDNIRGKHVRHYYIAAEEIIWNYAPSGIDIFTKENLTAPGSDSAVFFEQGTTRIGGSYKKLVYREYTDASFTNRKERGPEEEHLGILGPVIWAEVGDTIRVTFHNKGAYPLSIEPIGVRFNKNNEGTYYSPNYNPQSRSVPPSASHVAPTETFTYEWTVPKEVGPTNADPVCLAKMYYSAVDPTKDIFTGLIGPMKICKKGSLHANGRQKDVDKEFYLFPTVFDENESLLLEDNIRMFTTAPDQVDKEDEDFQESNKMHSMNGFMYGNQPGLTMCKGDSVVWYLFSAGNEADVHGIYFSGNTYLWRGERRDTANLFPQTSLTLHMWPDTEGTFNVECLTTDHYTGGMKQKYTVNQCRRQSEDSTFYLGERTYYIAAVEVEWDYSPQREWEKELHHLQEQNVSNAFLDKGEFYIGSKYKKVVYRQYTDSTFRVPVERKAEEEHLGILGPQLHADVGDKVKIIFKNMATRPYSIHAHGVQTESSTVTPTLPGETLTYVWKIPERSGAGTEDSACIPWAYYSTVDQVKDLYSGLIGPLIVCRRPYLKVFNPRRKLEFALLFLVFDENESWYLDDNIKTYSDHPEKVNKDDEEFIESNKMHAINGRMFGNLQGLTMHVGDEVNWYLMGMGNEIDLHTVHFHGHSFQYKHRGVYSSDVFDIFPGTYQTLEMFPRTPGIWLLHCHVTDHIHAGMETTYTVLQNEDTKSG

SEQ ID NO: 8 - protein, 622 aa, Homo sapiens
MAHVRGLQLPGCLALAALCSLVHSQHVFLAPQQARSLLQRVRRANTFLEEVRKGNLERECVEETCSYEEAFEALESSTATDVFWAKYTACETARTPRDKLAACLEGNCAEGLGTNYRGHVNITRSGIECQLWRSRYPHKPEINSTTHPGADLQENFCRNPDSSTTGPWCYTTDPTVRRQECSIPVCGQDQVTVAMTPRSEGSSVNLSPPLEQCVPDRGQQYQGRLAVTTHGLPCLAWASAQAKALSKHQDFNSAVQLVENFCRNPDGDEEGVWCYVAGKPGDFGYCDLNYCEEAVEEETGDGLDEDSDRAIEGRTATSEYQTFFNPRTFGSGEADCGLRPLFEKKSLEDKTERELLESYIDGRIVEGSDAEIGMSPWQVMLFRKSPQELLCGASLISDRWVLTAAHCLLYPPWDKNFTENDLLVRIGKHSRTRYERNIEKISMLEKIYIHPRYNWRENLDRDIALMKLKKPVAFSDYIHPVCLPDRETAASLLQAGYKGRVTGWGNLKETWTANVGKGQPSVLQVVNLPIVERPVCKDSTRIRITDNMFCAGYKPDEGKRGDACEGDSGGPFVMKSPFNNRWYQMGIVSWGEGCDRDGKYGFYTHVFRLKKWIQKVIDQFGE

SEQ ID NO: 9 - protein, 705 aa, Homo sapiens
MWLLYLLVPALFCRAGGSIPIPQKLFGEVTSPLFPKPYPNNFETTTVITVPTGYRVKLVFQQFDLEPSEGCFYDYVKISADKKSLGRFCGQLGSPLGNPPGKKEFMSQGNKMLLTFHTDFSNEENGTIMFYKGFLAYYQAVDLDECASRSKSGEEDPQPQCQHLCHNYVGGYFCSCRPGYELQEDTHSCQAECSSELYTEASGYISSLEYPRSYPPDLRCNYSIRVERGLTLHLKFLEPFDIDDHQQVHCPYDQLQIYANGKNIGEFCGKQRPPDLDTSSNAVDLLFFTDESGDSRGWKLRYTTEIIKCPQPKTLDEFTIIQNLQPQYQFRDYFIATCKQGYQLIEGNQVLHSFTAVCQDDGTWHRAMPRCKIKDCGQPRNLPNGDFRYTTTMGVNTYKARIQYYCHEPYYKMQTRAGSRESEQGVYTCTAQGIWKNEQKGEKIPRCLPVCGKPVNPVEQRQRIIGGQKAKMGNFPWQVFTNIHGRGGGALLGDRWILTAAHTLYPKEHEAQSNASLDVFLGHTNVEELMKLGNHPIRRVSVHPDYRQDESYNFEGDIALLELENSVTLGPNLLPICLPDNDTFYDLGLMGYVSGFGVMEEKIAHDLRFVRLPVANPQACENWLRGKNRMDVFSQNMFCAGHPSLKQDACQGDSGGVFAVRDPNTDRWVATGIVSWGIGCSRGYGFYTKVLNYVDWIKKEMEEED

SEQ ID NO: 10 - protein, 406 aa, Homo sapiens
MSALGAVIALLLWGQLFAVDSGNDVTDIADDGCPKPPEIAHGYVEHSVRYQCKNYYKLRTEGDGVYTLNDKKQWINKAVGDKLPECEADDGCPKPPEIAHGYVEHSVRYQCKNYYKLRTEGDGVYTLNNEKQWINKAVGDKLPECEAVCGKPKNPANPVQRILGGHLDAKGSFPWQAKMVSHHNLTTGATLINEQWLLTTAKNLFLNHSENATAKDIAPTLTLYVGKKQLVEIEKVVLHPNYSQVDIGLIKLKQKVSVNERVMPICLPSKDYAEVGRVGYVSGWGRNANFKFTDHLKYVMLPVADQDQCIRHYEGSTVPEKKTPKSPVGVQPILNEHTFCAGMSKYQEDTCYGDAGSAFAVHDLEEDTWYATGILSFDKSCAVAEYGVYVKVTSIQDWVQKTIAEN

SEQ ID NO: 11 - protein, 461 aa, Homo sapiens
MQRVNMIMAESPGLITICLLGYLLSAECTVFLDHENANKILNRPKRYNSGKLEEFVQGNLERECMEEKCSFEEAREVFENTERTTEFWKQYVDGDQCESNPCLNGGSCKDDINSYECWCPFGFEGKNCELDVTCNIKNGRCEQFCKNSADNKVVCSCTEGYRLAENQKSCEPAVPFPCGRVSVSQTSKLTRAETVFPDVDYVNSTEAETILDNITQSTQSFNDFTRVVGGEDAKPGQFPWQVVLNGKVDAFCGGSIVNEKWIVTAAHCVETGVKITVVAGEHNIEETEHTEQKRNVIRIIPHHNYNAAINKYNHDIALLELDEPLVLNSYVTPICIADKEYTNIFLKFGSGYVSGWGRVFHKGRSALVLQYLRVPLVDRATCLRSTKFTIYNNMFCAGFHEGGRDSCQGDSGGPHVTEVEGTSFLTGIISWGEECAMKGKYGIYTKVSRYVNWIKEKTKLT

SEQ ID NO: 12 - protein, 488 aa, Homo sapiens
MGRPLHLVLLSASLAGLLLLGESLFIRREQANNILARVTRANSFLEEMKKGHLERECMEETCSYEEAREVFEDSDKTNEFWNKYKDGDQCETSPCQNQGKCKDGLGEYTCTCLEGFEGKNCELFTRKLCSLDNGDCDQFCHEEQNSVVCSCARGYTLADNGKACIPTGPYPCGKQTLERRKRSVAQATSSSGEAPDSITWKPYDAADLDPTENPFDLLDFNQTQPERGDNNLTRIVGGQECKDGECPWQALLINEENEGFCGGTILSEFYILTAAHCLYQAKRFKVRVGDRNTEQEEGGEAVHEVEVVIKHNRFTKETYDFDIAVLRLKTPITFRMNVAPACLPERDWAESTLMTQKTGIVSGFGRTHEKGRQSTRLKMLEVPYVDRNSCKLSSSFIITQNMFCAGYDTKQEDACQGDSGGPHVTRFKDTYFVTGIVSWGEGCARKGKYGIYTKVTAFLKWIDRSMKTRGLPKAKSHAPEVITSSPLK

SEQ ID NO: 13 - protein, 253 aa, Homo sapiens
MHSWERLAVLVLLGAAACAAPPRGRILGGREAEAHARPYMASVQLNGAHLCGGVLVAEQWVLSAAHCLEDAADGKVQVLLGAHSLSQPEPSKRLYDVLRAVPHPDSQPDTIDHDLLLLQLSEKATLGPAVRPLPWQRVDRDVAPGTLCDVAGWGIVNHAGRRPDSLQHVLLPVLDRATCNRRTHHDGAITERLMCAESNRRDSCKGDSGGPLVCGGVLEGVVTSGSRVCGNRKKPGIYTRVASYAAWIDSVLA

SEQ ID NO: 14 - protein, 810 aa, Homo sapiens
MEHKEVVLLLLLFLKSGQGEPLDDYVNTQGASLFSVTKKQLGAGSIEECAAKCEEDEEFTCRAFQYHSKEQQCVIMAENRKSSIIIRMRDVVLFEKKVYLSECKTGNGKNYRGTMSKTKNGITCQKWSSTSPHRPRFSPATHPSEGLEENYCRNPDNDPQGPWCYTTDPEKRYDYCDILECEEECMHCSGENYDGKISKTMSGLECQAWDSQSPHAHGYIPSKFPNKNLKKNYCRNPDRELRPWCFTTDPNKRWELCDIPRCTTPPPSSGPTYQCLKGTGENYRGNVAVTVSGHTCQHWSAQTPHTHNRTPENFPCKNLDENYCRNPDGKRAPWCHTTNSQVRWEYCKIPSCDSSPVSTEQLAPTAPPELTPVVQDCYHGDGQSYRGTSSTTTTGKKCQSWSSMTPHRHQKTPENYPNAGLTMNYCRNPDADKGPWCFTTDPSVRWEYCNLKKCSGTEASVVAPPPVVLLPDVETPSEEDCMFGNGKGYRGKRATTVTGTPCQDWAAQEPHRHSIFTPETNPRAGLEKNYCRNPDGDVGGPWCYTTNPRKLYDYCDVPQCAAPSFDCGKPQVEPKKCPGRVVGGCVAHPHSWPWQVSLRTRFGMHFCGGTLISPEWVLTAAHCLEKSPRPSSYKVILGAHQEVNLEPHVQEIEVSRLFLEPTRKDIALLKLSSPAVITDKVIPACLPSPNYVVADRTECFITGWGETQGTFGAGLLKEAQLPVIENKVCNRYEFLNGRVQSTELCAGHLAGGTDSCQGDSGGPLVCFEKDKYILQGVTSWGLGCARPNKPGVYVRVSRFVTWIEGVMRNN

SEQ ID NO: 15 - protein, 615 aa, Homo sapiens
MRALLLLGFLLVSLESTLSIPPWEAPKEHKYKAEEHTVVLTVTGEPCHFPFQYHRQLYHKCTHKGRPGPQPWCATTPNFDQDQRWGYCLEPKKVKDHCSKHSPCQKGGTCVNMPSGPHCLCPQHLTGNHCQKEKCFEPQLLRFFHKNEIWYRTEQAAVARCQCKGPDAHCQRLASQACRTNPCLHGGRCLEVEGHRLCHCPVGYTGAFCDVDTKASCYDGRGLSYRGLARTTLSGAPCQPWASEATYRNVTAEQARNWGLGGHAFCRNPDNDIRPWCFVLNRDRLSWEYCDLAQCQTPTQAAPPTPVSPRLHVPLMPAQPAPPKPQPTTRTPPQSQTPGALPAKREQPPSLTRNGPLSCGQRLRKSLSSMTRVVGGLVALRGAHPYIAALYWGHSFCAGSLIAPCWVLTAAHCLQDRPAPEDLTVVLGQERRNHSCEPCQTLAVRSYRLHEAFSPVSYQHDLALLRLQEDADGSCALLSPYVQPVCLPSGAARPSETTLCQVAGWGHQFEGAEEYASFLQEAQVPFLSLERCSAPDVHGSSILPGMLCAGFLEGGTDACQGDSGGPLVCEDQAAERRLTLQGIISWGSGCGDRNKPGVYTDVAYYLAWIREHTVS

SEQ ID NO: 16 - protein, 764 aa, Homo sapiens
MGSNLSPQLCLMPFILGLLSGGVTTTPWSLARPQGSCSLEGVEIKGGSFRLLQEGQALEYVCPSGFYPYPVQTRTCRSTGSWSTLKTQDQKTVRKAECRAIHCPRPHDFENGEYWPRSPYYNVSDEISFHCYDGYTLRGSANRTCQVNGRWSGQTAICDNGAGYCSNPGIPIGTRKVGSQYRLEDSVTYHCSRGLTLRGSQRRTCQEGGSWSGTEPSCQDSFMYDTPQEVAEAFLSSLTETIEGVDAEDGHGPGEQQKRKIVLDPSGSMNIYLVLDGSDSIGASNFTGAKKCLVNLIEKVASYGVKPRYGLVTYATYPKIWVKVSEADSSNADWVTKQLNEINYEDHKLKSGTNTKKALQAVYSMMSWPDDVPPEGWNRTRHVIILMTDGLHNMGGDPITVIDEIRDLLYIGKDRKNPREDYLDVYVFGVGPLVNQVNINALASKKDNEQHVFKVKDMENLEDVFYQMIDESQSLSLCGMVWEHRKGTDYHKQPWQAKISVIRPSKGHESCMGAVVSEYFVLTAAHCFTVDDKEHSIKVSVGGEKRDLEIEVVLFHPNYNINGKKEAGIPEFYDYDVALIKLKNKLKYGQTIRPICLPCTEGTTRALRLPPTTTCQQQKEELLPAQDIKALFVSEEEKKLTRKEVYIKNGDKKGSCERDAQYAPGYDKVKDISEVVTPRFLCTGGVSPYADPNTCRGDSGGPLIVHKRSRFIQVGVISWGVVDVCKNQKRQKQVPAHARDFHINLFQVLPWLKEKLQDEDLGFL

SEQ ID NO: 17 - protein, 260 aa, Homo sapiens
MSHHWGYGKHNGPEHWHKDFPIAKGERQSPVDIDTHTAKYDPSLKPLSVSYDQATSLRILNNGHAFNVEFDDSQDKAVLKGGPLDGTYRLIQFHFHWGSLDGQGSEHTVDKKKYAAELHLVHWNTKYGDFGKAVQQPDGLAVLGIFLKVGSAKPGLQKVVDVLDSIKTKGKSADFTNFDPRGLLPESLDYWTYPGSLTTPPLLECVTWIVLKEPISVSSEQVLKFRKLNFNGEGEPEELMVDNWRPAQPLKNRQIKASFK

SEQ ID NO: 18 - protein, 464 aa, Homo sapiens
MYSNVIGTVTSGKRKVYLLSLLLIGFWDCVTCHGSPVDICTAKPRDIPMNPMCIYRSPEKKATEDEGSEQKIPEATNRRVWELSKANSRFATTFYQHLADSKNDNDNIFLSPLSISTAFAMTKLGACNDTLQQLMEVFKFDTISEKTSDQIHFFFAKLNCRLYRKANKSSKLVSANRLFGDKSLTFNETYQDISELVYGAKLQPLDFKENAEQSRAAINKWVSNKTEGRITDVIPSEAINELTVLVLVNTIYFKGLWKSKFSPENTRKELFYKADGESCSASMMYQEGKFRYRRVAEGTQVLELPFKGDDITMVLILPKPEKSLAKVEKELTPEVLQEWLDELEEMMLVVHMPRFRIEDGFSLKEQLQDMGLVDLFSPEKSKLPGIVAEGRDDLYVSDAFHKAFLEVNEEGSEAAASTAVVIAGRSLNPNRVTFKANRPFLVFIREVPLNTIIFMGRVANPCVK

SEQ ID NO: 19 - protein, 418 aa, Homo sapiens
MPSSVSWGILLLAGLCCLVPVSLAEDPQGDAAQKTDTSHHDQDHPTFNKITPNLAEFAFSLYRQLAHQSNSTNIFFSPVSIATAFAMLSLGTKADTHDEILEGLNFNLTEIPEAQIHEGFQELLRTLNQPDSQLQLTTGNGLFLSEGLKLVDKFLEDVKKLYHSEAFTVNFGDTEEAKKQINDYVEKGTQGKIVDLVKELDRDTVFALVNYIFFKGKWERPFEVKDTEEEDFHVDQVTTVKVPMMKRLGMFNIQHCKKLSSWVLLMKYLGNATAIFFLPDEGKLQHLENELTHDIITKFLENEDRRSASLHLPKLSITGTYDLKSVLGQLGITKVFSNGADLSGVTEEAPLKLSKAVHKAVLTIDEKGTEAAGAMFLEAIPMSIPPEVKFNKPFVFLMIEQNTKSPLFMGKVVNPTQK

SEQ ID NO: 20 - protein, 1474 aa, Homo sapiens
MGKNKLLHPSLVLLLLVLLPTDASVSGKPQYMVLVPSLLHTETTEKGCVLLSYLNETVTVSASLESVRGNRSLFTDLEAENDVLHCVAFAVPKSSSNEEVMFLTVQVKGPTQEFKKRTTVMVKNEDSLVFVQTDKSIYKPGQTVKFRVVSMDENFHPLNELIPLVYIQDPKGNRIAQWQSFQLEGGLKQFSFPLSSEPFQGSYKVVVQKKSGGRTEHPFTVEEFVLPKFEVQVTVPKIITILEEEMNVSVCGLYTYGKPVPGHVTVSICRKYSDASDCHGEDSQAFCEKFSGQLNSHGCFYQQVKTKVFQLKRKEYEMKLHTEAQIQEEGTVVELTGRQSSEITRTITKLSFVKVDSHFRQGIPFFGQVRLVDGKGVPIPNKVIFIRGNEANYYSNATTDEHGLVQFSINTTNVMGTSLTVRVNYKDRSPCYGYQWVSEEHEEAHHTAYLVFSPSKSFVHLEPMSHELPCGHTQTVQAHYILNGGTLLGLKKLSFYYLIMAKGGIVRTGTHGLLVKQEDMKGHFSISIPVKSDIAPVARLLIYAVLPTGDVIGDSAKYDVENCLANKVDLSFSPSQSLPASHAHLRVTAAPQSVCALRAVDQSVLLMKPDAELSASSVYNLLPEKDLTGFPGPLNDQDNEDCINRHNVYINGITYTPVSSTNEKDMYSFLEDMGLKAFTNSKIRKPKMCPQLQQYEMHGPEGLRVGFYESDVMGRGHARLVHVEEPHTETVRKYFPETWIWDLVVVNSAGVAEVGVTVPDTITEWKAGAFCLSEDAGLGISSTASLRAFQPFFVELTMPYSVIRGEAFTLKATVLNYLPKCIRVSVQLEASPAFLAVPVEKEQAPHCICANGRQTVSWAVTPKSLGNVNFTVSAEALESQELCGTEVPSVPEHGRKDTVIKPLLVEPEGLEKETTFNSLLCPSGGEVSEELSLKLPPNVVEESARASVSVLGDILGSAMQNTQNLLQMPYGCGEQNMVLFAPNIYVLDYLNETQQLTPEIKSKAIGYLNTGYQRQLNYKHYDGSYSTFGERYGRNQGNTWLTAFVLKTFAQARAYIFIDEAHITQALIWLSQRQKDNGCFRSSGSLLNNAIKGGVEDEVTLSAYITIALLEIPLTVTHPVVRNALFCLESAWKTAQEGDHGSHVYTKALLAYAFALAGNQDKRKEVLKSLNEEAVKKDNSVHWERPQKPKAPVGHFYEPQAPSAEVEMTSYVLLAYLTAQPAPTSEDLTSATNIVKWITKQQNAQGGFSSTQDTVVALHALSKYGAATFTRTGKAAQVTIQSSGTFSSKFQVDNNNRLLLQQVSLPELPGEYSMKVTGEGCVYLQTSLKYNILPEKEEFPFALGVQTLPQTCDEPKAHTSFQISLSVSYTGSRSASNMAIVDVKMVSGFIPLKPTVKMLERSNHVSRTEVSSNHVLIYLDKVSNQTLSLFFTVLQDVPVRDLKPAIVKVYDYYETDEFAIAEYNAPCSKDLGNA

SEQ ID NO: 21 - protein, 1663 aa, Homo sapiens
MGPTSGPSLLLLLLTHLPLALGSPMYSIITPNILRLESEETMVLEAHDAQGDVPVTVTVHDFPGKKLVLSSEKTVLTPATNHMGNVTFTIPANREFKSEKGRNKFVTVQATFGTQVVEKVVLVSLQSGYLFIQTDKTIYTPGSTVLYRIFTVNHKLLPVGRTVMVNIENPEGIPVKQDSLSSQNQLGVLPLSWDIPELVNMGQWKIRAYYENSPQQVFSTEFEVKEYVLPSFEVIVEPTEKFYYIYNEKGLEVTITARFLYGKKVEGTAFVIFGIQDGEQRISLPESLKRIPIEDGSGEVVLSRKVLLDGVQNPRAEDLVGKSLYVSATVILHSGSDMVQAERSGIPIVTSPYQIHFTKTPKYFKPGMPFDLMVFVTNPDGSPAYRVPVAVQGEDTVQSLTQGDGVAKLSINTHPSQKPLSITVRTKKQELSEAEQATRTMQALPYSTVGNSNNYLHLSVLRTELRPGETLNVNFLLRMDRAHEAKIRYYTYLIMNKGRLLKAGRQVREPGQDLVVLPLSITTDFIPSFRLVAYYTLIGASGQREVVADSVWVDVKDSCVGSLVVKSGQSEDRQPVPGQQMTLKIEGDHGARVVLVAVDKGVFVLNKKNKLTQSKIWDVVEKADIGCTPGSGKDYAGVFSDAGLTFTSSSGQQTAQRAELQCPQPAARRRRSVQLTEKRMDKVGKYPKELRKCCEDGMRENPMRFSCQRRTRFISLGEACKKVFLDCCNYITELRRQHARASHLGLARSNLDEDIIAEENIVSRSEFPESWLWNVEDLKEPPKNGISTKLMNIFLKDSITTWEILAVSMSDKKGICVADPFEVTVMQDFFIDLRLPYSVVRNEQVEIRAVLYNYRQNQELKVRVELLHNPAFCSLATTKRRHQQTVTIPPKSSLSVPYVIVPLKTGLQEVEVKAAVYHHFISDGVRKSLKVVPEGIRMNKTVAVRTLDPERLGREGVQKEDIPPADLSDQVPDTESETRILLQGTPVAQMTEDAVDAERLKHLIVTPSGCGEQNMIGMTPTVIAVHYLDETEQWEKFGLEKRQGALELIKKGYTQQLAFRQPSSAFAAFVKRAPSTWLTAYVVKVFSLAVNLIAIDSQVLCGAVKWLILEKQKPDGVFQEDAPVIHQEMIGGLRNNNEKDMALTAFVLISLQEAKDICEEQVNSLPGSITKAGDFLEANYMNLQRSYTVAIAGYALAQMGRLKGPLLNKFLTTAKDKNRWEDPGKQLYNVEATSYALLALLQLKDFDFVPPVVRWLNEQRYYGGGYGSTQATFMVFQALAQYQKDAPDHQELNLDVSLQLPSRSSKITHRIHWESASLLRSEETKENEGFTVTAEGKGQGTLSVVTMYHAKAKDQLTCNKFDLKVTIKPAPETEKRPQDAKNTMILEICTRYRGDQDATMSILDISMMTGFAPDTDDLKQLANGVDRYISKYELDKAFSDRNTLIIYLDKVSHSEDDCLAFKVHQYFNVELIQPGAVKVYAYYNLEESCTRFYHPEKEDGKLNKLCRDELCRCAEENCFIQKSDDKVTLEERLDKACEPGVDYVYKTRLVKVQLSNDFDEYIMAIEQTIKSGSDEVQVGQQRTFISPIKCREALKLEEKKHYLMWGLSSDFWGEKPNLSYIIGKDTWVEHWPEEDECQDEENQKQCQDLGAFTESMVVFGCPN

SEQ ID NO: 22 - protein, 1676 aa, Homo sapiens
MGLLGILCFLIFLGKTWGQEQTYVISAPKIFRVGASENIVIQVYGYTEAFDATISIKSYPDKKFSYSSGHVHLSSENKFQNSAILTIQPKQLPGGQNPVSYVYLEVVSKHFSKSKRMPITYDNGFLFIHTDKPVYTPDQSVKVRVYSLNDDLKPAKRETVLTFIDPEGSEVDMVEEIDHIGIISFPDFKIPSNPRYGMWTIKAKYKEDFSTTGTAYFEVKEYVLPHFSVSIEPEYNFIGYKNFKNFEITIKARYFYNKVVTEADVYITFGIREDLKDDQKEMMQTAMQNTMLINGIAQVTFDSETAVKELSYYSLEDLNNKYLYIAVTVIESTGGFSEEAEIPGIKYVLSPYKLNLVATPLFLKPGIPYPIKVQVKDSLDQLVGGVPVTLNAQTIDVNQETSDLDPSKSVTRVDDGVASFVLNLPSGVTVLEFNVKTDAPDLPEENQAREGYRAIAYSSLSQSYLYIDWTDNHKALLVGEHLNIIVTPKSPYIDKITHYNYLILSKGKIIHFGTREKFSDASYQSINIPVTQNMVPSSRLLVYYIVTGEQTAELVSDSVWLNIEEKCGNQLQVHLSPDADAYSPGQTVSLNMATGMDSWVALAAVDSAVYGVQRGAKKPLERVFQFLEKSDLGCGAGGGLNNANVFHLAGLTFLTNANADDSQENDEPCKEILRPRRTLQKKIEEIAAKYKHSVVKKCCYDGACVNNDETCEQRAARISLGPRCIKAFTECCVVASQLRANISHKDMQLGRLHMKTLLPVSKPEIRSYFPESWLWEVHLVPRRKQLQFALPDSLTTWEIQGVGISNTGICVADTVKAKVFKDVFLEMNIPYSVVRGEQIQLKGTVYNYRTSGMQFCVKMSAVEGICTSESPVIDHQGTKSSKCVRQKVEGSSSHLVTFTVLPLEIGLHNINFSLETWFGKEILVKTLRVVPEGVKRESYSGVTLDPRGIYGTISRRKEFPYRIPLDLVPKTEIKRILSVKGLLVGEILSAVLSQEGINILTHLPKGSAEAELMSVVPVFYVFHYLETGNHWNIFHSDPLIEKQKLKKKLKEGMLSIMSYRNADYSYSVWKGGSASTWLTAFALRVLGQVNKYVEQNQNSICNSLLWLVENYQLDNGSFKENSQYQPIKLQGTLPVEARENSLYLTAFTVIGIRKAFDICPLVKIDTALIKADNFLLENTLPAQSTFTLAISAYALSLGDKTHPQFRSIVSALKREALVKGNPPIYRFWKDNLQHKDSSVPNTGTARMVETTAYALLTSLNLKDINYVNPVIKWLSEEQRYGGGFYSTQDTINAIEGLTEYSLLVKQLRLSMDIDVSYKHKGALHNYKMTDKNFLGRPVEVLLNDDLIVSTGFGSGLATVHVTTVVHKTSTSEEVCSFYLKIDTQDIEASHYRGYGNSDYKRIVACASYKPSREESSSGSSHAVMDISLPTGISANEEDLKALVEGVDQLFTDYQIKDGHVILQLNSIPSSDFLCVRFRIFELFEVGFLSPATFTVYEYHRPDKQCTMFYSTSNIKIQKVCEGAACKCVEADCGQMQEELDLTISAETRKQTACKPEIAYAYKVSITSITVENVFVKYKATLLDIYKTGEAVAEKDSEITFIKKVTCTNAELVKGRQYLIMGKEALQIKYNFSFRYIYPLDSLTWIEYWPRDTTCSSCQAFLANLDEFAEDIFLNGC

SEQ ID NO: 23 - protein, 146 aa, Homo sapiens
MAGPLRAPLLLLAILAVALAVSPAAGSSPGKPPRLVGGPMDASVEEEGVRRALDFAVGEYNKASNDMYHSRALQVVRARKQIVAGVNYFLDVELGRTTCTKTQPNLDNCPFHDQPHLKRKAFCSFQIYAVPWQGTMTLSKSTCQDA

SEQ ID NO: 24 - protein, 644 aa, Homo sapiens
MKLITILFLCSRLLLSLTQESQSEEIDCNDKDLFKAVDAALKKYNSQNQSNNQFVLYRITEATKTVGSDTFYSFKYEIKEGDCPVQSGKTWQDCEYKDAAKAATGECTATVGKRSSTKFSVATQTCQITPAEGPVVTAQYDCLGCVHPISTQSPDLEPILRHGIQYFNNNTQHSSLFMLNEVKRAQRQVVAGLNFRITYSIVQTNCSKENFLFLTPDCKSLWNGDTGECTDNAYIDIQLRIASFSQNCDIYPGKDFVQPPTKICVGCPRDIPTNSPELEETLTHTITKLNAENNATFYFKIDNVKKARVQVVAGKKYFIDFVARETTCSKESNEELTESCETKKLGQSLDCNAEVYVVPWEKKIYPTVNCQPLGMISLMKRPPGFSPFRSSRIGEIKEETTVSPPHTSMAPAQDEERDSGKEQGHTRRHDWGHEKQRKHNLGHGHKHERDQGHGHQRGHGLGHGHEQQHGLGHGHKFKLDDDLEHQGGHVLDHGHKHKHGHGHGKHKNKGKKNGKHNGWKTEHLASSSEDSTTPSAQTQEKTEGPTPIPSLAKPGVTVTFSDFQDSDLIATMMPPISPAPIQSDDDWIPDIQIDPNGLSFNPISDFPDTTSPKCPGRPWKSVSEINPTTQMKESYYFDLTDGLS

SEQ ID NO: 25 - protein, 180 aa, Homo sapiens
MGIPMGKSMLVLLTFLAFASCCIAAYRPSETLCGGELVDTLQFVCGDRGFYFSRPASRVSRRSRGIVEECCFRSCDLALLETYCATPAKSERDVSTPPTVLPDNFPRYPVGKFFQYDTWKQSTQRLRRGLPALLRARRGHVLAKELEAFREAKRHRPLIALPTQDPAHGGAPPEMASNRK

SEQ ID NO: 26 - protein, 159 aa, Homo sapiens
MKNHLLFWGVLAVFIKAVHVKAQEDERIVLVDNKCKCARITSRIIRSSEDPNEDIVERNIRIIVPLNNRENISDPTSPLRTRFVYHLSDLCKKCDPTEVELDNQIVTATQSNICDEDSATETCYTYDRNKCYTAVVPLVYGGETKMVETALTPDACYPD

SEQ ID NO: 27 - protein, 107 aa, Homo sapiens [sequence omitted]

SEQ ID NO: 28 - protein, 1466 aa, Homo sapiens
MMSFVQKGSWLLLALLHPTIILAQQEAVEGGCSHLGQSYADRDVWKPEPCQICVCDSGSVLCDDIICDDQELDCPNPEIPFGECCAVCPQPPTAPTRPPNGQGPQGPKGDPGPPGIPGRNGDPGIPGQPGSPGSPGPPGICESCPTGPQNYSPQYDSYDVKSGVAVGGLAGYPGPAGPPGPPGPPGTSGHPGSPGSPGYQGPPGEPGQAGPSGPPGPPGAIGPSGPAGKDGESGRPGRPGERGLPGPPGIKGPAGIPGFPGMKGHRGFDGRNGEKGETGAPGLKGENGLPGENGAPGPMGPRGAPGERGRPGLPGAAGARGNDGARGSDGQPGPPGPPGTAGFPGSPGAKGEVGPAGSPGSNGAPGQRGEPGPQGHAGAQGPPGPPGINGSPGGKGEMGPAGIPGAPGLMGARGPPGPAGANGAPGLRGGAGEPGKNGAKGEPGPRGERGEAGIPGVPGAKGEDGKDGSPGEPGANGLPGAAGERGAPGFRGPAGPNGIPGEKGPAGERGAPGPAGPRGAAGEPGRDGVPGGPGMRGMPGSPGGPGSDGKPGPPGSQGESGRPGPPGPSGPRGQPGVMGFPGPKGNDGAPGKNGERGGPGGPGPQGPPGKNGETGPQGPPGPTGPGGDKGDTGPPGPQGLQGLPGTGGPPGENGKPGEPGPKGDAGAPGAPGGKGDAGAPGERGPPGLAGAPGLRGGAGPPGPEGGKGAAGPPGPPGAAGTPGLQGMPGERGGLGSPGPKGDKGEPGGPGADGVPGKDGPRGPTGPIGPPGPAGQPGDKGEGGAPGLPGIAGPRGSPGERGETGPPGPAGFPGAPGQNGEPGGKGERGAPGEKGEGGPPGVAGPPGGSGPAGPPGPQGVKGERGSPGGPGAAGFPGARGLPGPPGSNGNPGPPGPSGSPGKDGPPGPAGNTGAPGSPGVSGPKGDAGQPGEKGSPGAQGPPGAPGPLGIAGITGARGLAGPPGMPGPRGSPGPQGVKGESGKPGANGLSGERGPPGPQGLPGLAGTAGEPGRDGNPGSDGLPGRDGSPGGKGDRGENGSPGAPGAPGHPGPPGPVGPAGKSGDRGESGPAGPAGAPGPAGSRGAPGPQGPRGDKGETGERGAAGIKGHRGFPGNPGAPGSPGPAGQQGAIGSPGPAGPRGPVGPSGPPGKDGTSGHPGPIGPPGPRGNRGERGSEGSPGHPGQPGPPGPPGAPGPCCGGVGAAAIAGIGGEKAGGFAPYYGDEPMDFKINTDEIMTSLKSVNGQIESLISPDGSRKNPARNCRDLKFCHPELKSGEYWVDPNQGCKLDAIKVFCNMETGETCISANPLNVPRKHWWTDSSAEKKHVWFGESMDGGFQFSYGNPELPEDVLDVHLAFLRLLSSRASQNITYHCKNSIAYMDQASGNVKKALKLMGSNEGEFKAEGNSKFTYTVLEDGCTKHTGEWSKTVFEYRTRKAVRLPIVDIAPYDIGGPDQEFGVDVGPVCFL

SEQ ID NO: 29 - protein, 472 aa, Homo sapiens
MTTCSRQFTSSSSMKGSCGIGGGIGGGSSRISSVLAGGSCRAPSTYGGGLSVSSSRFSSGGACGLGGGYGGGFSSSSSSFGSGFGGGYGGGLGAGLGGGFGGGFAGGDGLLVGSEKVTMQNLNDRLASYLDKVRALEEANADLEVKIRDWYQRQRPAEIKDYSPYFKTIEDLRNKILTATVDNANVLLQIDNARLAADDFRTKYETELNLRMSVEADINGLRRVLDELTLARADLEMQIESLKEELAYLKKNHEEEMNALRGQVGGDVNVEMDAAPGVDLSRILNEMRDQYEKMAEKNRKDAEEWFFTKTEELNREVATNSELVQSGKSEISELRRTMQNLEIELQSQLSMKASLENSLEETKGRYCMQLAQIQEMIGSVEEQLAQLRCEMEQQNQEYKILLDVKTRLEQEIATYRRLLEGEDAHLSSSQFSSGSQSSRDVTSSSRQIRTKVMDVHDGKVVSTHEQVLRTKN

SEQ ID NO: 30 - protein, 267 aa, Homo sapiens
MKAAVLTLAVLFLTGSQARHFWQQDEPPQSPWDRVKDLATVYVDVLKDSGRDYVSQFEGSALGKQLNLKLLDNWDSVTSTFSKLREQLGPVTQEFWDNLEKETEGLRQEMSKDLEEVKAKVQPYLDDFQKKWQEEMELYRQKVEPLRAELQEGARQKLHELQEKLSPLGEEMRDRARAHVDALRTHLAPYSDELRQRLAARLEALKENGGARLAEYHAKATEHLSTLSEKAKPALEDLRQGLLPVLESFKVSFLSALEEYTKKLNTQ

SEQ ID NO: 31 - protein, 317 aa, Homo sapiens [sequence omitted]

SEQ ID NO: 32 - protein, 100 aa, Homo sapiens
MKLLAATVLLLTICSLEGALVRRQAKEPCVESLVSQYFQTVTDYGKDLMEKVKSPELQAEAKSYFEKSKEQLTPLIKKAGTELVNFLSYFVELGTQPATQ

SEQ ID NO: 33 - protein, 101 aa, Homo sapiens
MGTRLLPALFLVLLVLGFEVQGTQQPQQDEMPSPTFLTQVKESLSSYWESAKTAAQNLYEKTYLPAVDEKLRDLYSKSTAAMSTYTGIFTDQVLSVLKGEE

SEQ ID NO: 34 - protein, 99 aa, Homo sapiens
MQPRVLLVVALLALLASARASEAEDASLLSFMQGYMKHATKTAKDALSSVQESQVAQQARGWVTDGFSSLKDYWSTVKDKFSEFWDLDPEVRPTSAVAA

SEQ ID NO: 35 - protein, 224 aa, Homo sapiens
MEKLLCFLVLTSLSHAFGQTDMSRKAFVFPKESDTSYVSLKAPLTKPLKAFTVCLHFYTELSSTRGYSIFSYATKRQDNEILIFWSKDIGYSFTVGGSEILFEVPEVTVAPVHICTSWESASGIVEFWVDGKPRVRKSLKKGYTVGAEASIILGQEQDSFGGNFEGSQSLVGDIGNVNMWDFVLSPDEINTIYLGGPFSPNVLNWRALKYEVQGEVFTKPQLWP

SEQ ID NO: 36 - protein, 223 aa, Homo sapiens
MNKPLLWISVLTSLLEAFAHTDLSGKVFVFPRESVTDHVNLITPLEKPLQNFTLCFRAYSDLSRAYSLFSYNTQGRDNELLVYKERVGEYSLYIGRHKVTSKVIEKFPAPVHICVSWESSSGIAEFWINGTPLVKKGLRQGYFVEAQPKIVLGQEQDSYGGKFDRSQSFVGEIGDLYMWDSVLPPENILSAYQGTPLPANILDWQALNYEIRGYVIIKPLVWV

SEQ ID NO: 37 - protein, 245 aa, Homo sapiens
MEGPRGWLVLCVLAISLASMVTEDLCRAPDGKKGEAGRPGRRGRPGLKGEQGEPGAPGIRTGIQGLKGDQGEPGPSGNPGKVGYPGPSGPLGARGIPGIKGTKGSPGNIKDQPRPAFSAIRRNPPMGGNVVIFDTVITNQEEPYQNHSGRFVCTVPGYYYFTFQVLSQWEICLSIVSSSRGQVRRSLGFCDTTNKGLFQVVSGGMVLQLQQGDQVWVEKDPKKGHIYQGSEADSVFSGFLIFPSA

SEQ ID NO: 38 - protein, 245 aa, Homo sapiens
MDVGPSSLPHLGLKLLLLLLLLPLRGQANTGCYGIPGMPGLPGAPGKDGYDGLPGPKGEPGIPAIPGIRGPKGQKGEPGLPGHPGKNGPMGPPGMPGVPGPMGIPGEPGEEGRYKQKFQSVFTVTRQTHQPPAPNSLIRFNAVLTNPQGDYDTSTGKFTCKVPGLYYFVYHASHTANLCVLLYRSGVKVVTFCGHTSKTNQVNSGGVLLRLQVGEEVWLAVNDYYDMVGIQGSDSVFSGFLLFPD

SEQ ID NO: 39 - protein, 559 aa, Homo sapiens
MSACRSFAVAICILEISILTAQYTTSYDPELTESSGSASHIDCRMSPWSEWSQCDPCLRQMFRSRSIEVFGQFNGKRCTDAVGDRRQCVPTEPCEDAEDDCGNDFQCSTGRCIKMRLRCNGDNDCGDFSDEDDCESEPRPPCRDRVVEESELARTAGYGINILGMDPLSTPFDNEFYNGLCNRDRDGNTLTYYRRPWNVASLIYETKGEKNFRTEHYEEQIEAFKSIIQEKTSNFNAAISLKFTPTETNKAEQCCEETASSISLHGKGSFRFSYSKNETYQLFLSYSSKKEKMFLHVKGEIHLGRFVMRNRDVVLTTTFVDDIKALPTTYEKGEYFAFLETYGTHYSSSGSLGGLYELIYVLDKASMKRKGVELKDIKRCLGYHLDVSLAFSEISVGAEFNKDDCVKRGEGRAVNITSENLIDDVVSLIRGGTRKYAFELKEKLLRGTVIDVTDFVNWASSINDAPVLISQKLSPIYNLVPVKMKNAHLKKQNLERAIEDYINEFSVRKCHTCQNGGTVILMDGKCLCACPFKFEGIACEISKQKISEGLPALEFPNEK

SEQ ID NO: 40 - protein, 345 aa, Homo sapiens
MISPVLILFSSFLCHVAIAGRTCPKPDDLPFSTVVPLKTFYEPGEEITYSCKPGYVSRGGMRKFICPLTGLWPINTLKCTPRVCPFAGILENGAVRYTTFEYPNTISFSCNTGFYLNGADSAKCTEEGKWSPELPVCAPIICPPPSIPTFATLRVYKPSAGNNSLYRDTAVFECLPQHAMFGNDTITCTTHGNWTKLPECREVKCPFPSRPDNGFVNYPAKPTLYYKDKATFGCHDGYSLDGPEEIECTKLGNWSAMPSCKASCKVPVKKATVVYQGERVKIQEKFKNGMLHGDKVSFFCKNKEKKCSYTEDAQCIDGTIEVPKCFKEHSSLAFWKTDASDVKPC

SEQ ID NO: 41 - protein, 2386 aa, Homo sapiens
MLRGPGPGLLLLAVQCLGTAVPSTGASKSKRQAQQMVQPQSPVAVSQSKPGCYDNGKHYQINQQWERTYLGNALVCTCYGGSRGFNCESKPEAEETCFDKYTGNTYRVGDTYERPKDSMIWDCTCIGAGRGRISCTIANRCHEGGQSYKIGDTWRRPHETGGYMLECVCLGNGKGEWTCKPIAEKCFDHAAGTSYVVGETWEKPYQGWMMVDCTCLGEGSGRITCTSRNRCNDQDTRTSYRIGDTWSKKDNRGNLLQCICTGNGRGEWKCERHTSVQTTSSGSGPFTDVRAAVYQPQPHPQPPPYGHCVTDSGVVYSVGMQWLKTQGNKQMLCTCLGNGVSCQETAVTQTYGGNSNGEPCVLPFTYNGRTFYSCTTEGRQDGHLWCSTTSNYEQDQKYSFCTDHTVLVQTRGGNSNGALCHFPFLYNNHNYTDCTSEGRRDNMKWCGTTQNYDADQKFGFCPMAAHEEICTTNEGVMYRIGDQWDKQHDMGHMMRCTCVGNGRGEWTCIAYSQLRDQCIVDDITYNVNDTFHKRHEEGHMLNCTCFGQGRGRWKCDPVDQCQDSETGTFYQIGDSWEKYVHGVRYQCYCYGRGIGEWHCQPLQTYPSSSGPVEVFITETPSQPNSHPIQWNAPQPSHISKYILRWRPKNSVGRWKEATIPGHLNSYTIKGLKPGVVYEGQLISIQQYGHQEVTRFDFTTTSTSTPVTSNTVTGETTPFSPLVATSESVTEITASSFVVSWVSASDTVSGFRVEYELSEEGDEPQYLDLPSTATSVNIPDLLPGRKYIVNVYQISEDGEQSLILSTSQTTAPDAPPDTTVDQVDDTSIVVRWSRPQAPITGYRIVYSPSVEGSSTELNLPETANSVTLSDLQPGVQYNITIYAVEENQESTPVVIQQETTGTPRSDTVPSPRDLQFVEVTDVKVTIMWTPPESAVTGYRVDVIPVNLPGEHGQRLPISRNTFAEVTGLSPGVTYYFKVFAVSHGRESKPLTAQQTTKLDAPTNLQFVNETDSTVLVRWTPPRAQITGYRLTVGLTRRGQPRQYNVGPSVSKYPLRNLQPASEYTVSLVAIKGNQESPKATGVFTTLQPGSSIPPYNTEVTETTIVITWTPAPRIGFKLGVRPSQGGEAPREVTSDSGSIVVSGLTPGVEYVYTIQVLRDGQERDAPIVNKVVTPLSPPTNLHLEANPDTGVLTVSWERSTTPDITGYRITTTPTNGQQGNSLEEVVHADQSSCTFDNLSPGLEYNVSVYTVKDDKESVPISDTIIPAVPPPTDLRFTNIGPDTMRVTWAPPPSIDLTNFLVRYSPVKNEEDVAELSISPSDNAVVLTNLLPGTEYVVSVSSVYEQHESTPLRGRQKTGLDSPTGIDFSDITANSFTVHWIAPRATITGYRIRHHPEHFSGRPREDRVPHSRNSITLTNLTPGTEYVVSIVALNGREESPLLIGQQSTVSDVPRDLEVVAATPTSLLISWDAPAVTVRYYRITYGETGGNSPVQEFTVPGSKSTATISGLKPGVDYTITVYAVTGRGDSPASSKPISINYRTEIDKPSQMQVTDVQDNSISVKWLPSSSPVTGYRVTTTPKNGPGPTKTKTAGPDQTEMTIEGLQPTVEYVVSVYAQNPSGESQPLVQTAVTNIDRPKGLAFTDVDVDSIKIAWESPQGQVSRYRVTYSSPEDGIHELFPAPDGEEDTAELQGLRPGSEYTVSVVALHDDMESQPLIGTQSTAIPAPTDLKFTQVTPTSLSAQWTPPNVQLTGYRVRVTPKEKTGPMKEINLAPDSSSVVVSGLMVATKYEVSVYALKDTLTSRPAQGVVTTLENVSPPRRARVTDATETTITISWRTKTETITGFQVDAVPANGQTPIQRTIKPDVRSYTITGLQPGTDYKIYLYTLNDNARSSPVVIDASTAIDAPSNLRFLATTPNSLLVSWQPPRARITGYIIKYEKPGSPPREVVPRPRPGVTEATITGLEPGTEYTIYVIALKNNQKSEPLIGRKKTDELPQLVTLPHPNLHGPEILDVPSTVQKTPFVTHPGYDTGNGIQLPGTSGQQPSVGQQMIFEEHGFRRTTPPTTATPIRHRPRPYPPNVGEEIQIGHIPREDVDYHLYPHGPGLNPNASTGQEALSQTTISWAPFQDTSEYIISCHPVGTDEEPLQFRVPGTSTSATLTGLTRGATYNVIVEALKDQQRHKVREEVVTVGNSVNEGLNQPTDDSCFDPYTVSHYAVGDEWERMSESGFKLLCQCLGFGSGHFRCDSSRWCHDNGVNYKIGEKWDRQGENGQMMSCTCLGNGKGEFKCDPHEATCYDDGKTYHVGEQWQKEYLGAICSCTCFGGQRGWRCDNCRRPGGEPSPEGTTGQSYNQYSQRYHQRTNTNVNCPIECFMPLDVQADREDSRE

SEQ ID NO: 42 - protein, 352 aa, Homo sapiens
MRSLGALLLLLSACLAVSAGPVPTPPDNIQVQENFNISRIYGKWYNLAIGSTCPWLKKIMDRMTVSTLVLGEGATEAEISMTSTRWRKGVCEETSGAYEKTDTDGKFLYHKSKWNITMESYVVHTNYDEYAIFLTKKFSRHHGPTITAKLYGRAPQLRETLLQDFRVVAQGVGIPEDSIFTMADRGECVPGEQEPEPILIPRVRRAVLPQEEEGSGGGQLVTEVTKKEDSCQLGYSAGPCMGMTSRYFYNGTSMACETFQYGGCMGNGNNFVTEKECLQTCRTVAACNLPIVRGPCRAFIQLWAFDAVKGKCVLFPYGGCQGNGNKFYSEKECREYCGVPGDGDEELLRFSN

SEQ ID NO: 43 - protein, 367 aa, Homo sapiens
MKSLVLLLCLAQLWGCHSAPHGPGLIYRQPNCDDPETEEAALVAIDYINQNLPWGYKHTLNQIDEVKVWPQQPSGELFEIEIDTLETTCHVLDPTPVARCSVRQLKEHAVEGDCDFQLLKLDGKFSVVYAKCDSSPDSAEDVRKVCQDCPLLAPLNDTRVVHAAKAALAAFNAQNNGSNFQLEEISRAQLVPLPPSTYVEFTVSGTDCVAKEATEAAKCNLLAEKQYGFCKATLSEKLGGAEVAVTCTVFQTQPVTSQPQPEGANEAVPTPVVDPDAPPSPPLGAPGLPPAGSPPDSHVLLAAPPGHQLHRAHYDLRHTFMGVVSLGSPSGEVSHPRKTRTVVQPSVGAAAGPVVPPCPGRIRHFKV

SEQ ID NO: 44 - protein, 609 aa, Homo sapiens [sequence omitted]

SEQ ID NO: 45 - protein, 474 aa, Homo sapiens [sequence omitted]

SEQ ID NO: 46 - protein, 128 aa, Homo sapiens
MSLRLDTTPSCNSARPLHALQVLLLLSLLLTALASSTKGQTKRNLAKGKEESLDSDLYAELRCMCIKTTSGIHPKNIQSLEVIGKGTHCNQVEVIATLKDGRKICLDPDAPRIKKIVQKKLAGDESAD

SEQ ID NO: 47 - protein, 698 aa, Homo sapiens
MRLAVGALLVCAVLGLCLAVPDKTVRWCAVSEHEATKCQSFRDHMKSVIPSDGPSVACVKKASYLDCIRAIAANEADAVTLDAGLVYDAYLAPNNLKPVVAEFYGSKEDPQTFYYAVAVVKKDSGFQMNQLRGKKSCHTGLGRSAGWNIPIGLLYCDLPEPRKPLEKAVANFFSGSCAPCADGTDFPQLCQLCPGCGCSTLNQYFGYSGAFKCLKDGAGDVAFVKHSTIFENLANKADRDQYELLCLDNTRKPVDEYKDCHLAQVPSHTVVARSMGGKEDLIWELLNQAQEHFGKDKSKEFQLFSSPHGKDLLFKDSAHGFLKVPPRMDAKMYLGYEYVTAIRNLREGTCPEAPTDECKPVKWCALSHHERLKCDEWSVNSVGKIECVSAETTEDCIAKIMNGEADAMSLDGGFVYIAGKCGLVPVLAENYNKSDNCEDTPEAGYFAIAVVKKSASDLTWDNLKGKKSCHTAVGRTAGWNIPMGLLYNKINHCRFDEFFSEGCAPGSKKDSSLCKLCMGSGLNLCEPNNKEGYYGYTGAFRCLVEKGDVAFVKHQTVPQNTGGKNPDPWAKNLNEKDYELLCLDGTRKPVEEYANCHLARAPNHAVVTRKDKEACVHKILRQQQHLFGSNVTDCSGNFCLFRSETKDLLFRDDTVCLAKLHDRNTYEKYLGEEYVKAVGNLRKCSTSSLLEACTFRRP

SEQ ID NO: 48 - protein, 710 aa, Homo sapiens
MKLVFLVLLFLGALGLCLAGRRRSVQWCAVSQPEATKCFQWQRNMRKVRGPPVSCIKRDSPIQCIQAIAENRADAVTLDGGFIYEAGLAPYKLRPVAAEVYGTERQPRTHYYAVAVVKKGGSFQLNELQGLKSCHTGLRRTAGWNVPIGTLRPFLNWTGPPEPIEAAVARFFSASCVPGADKGQFPNLCRLCAGTGENKCAFSSQEPYFSYSGAFKCLRDGAGDVAFIRESTVFEDLSDEAERDEYELLCPDNTRKPVDKFKDCHLARVPSHAVVARSVNGKEDAIWNLLRQAQEKFGKDKSPKFQLFGSPSGQKDLLFKDSAIGFSRVPPRIDSGLYLGSGYFTAIQNLRKSEEEVAARRARVVWCAVGEQELRKCNQWSGLSEGSVTCSSASTTEDCIALVLKGEADAMSLDGGYVYTAGKCGLVPVLAENYKSQQSSDPDPNCVDRPVEGYLAVAVVRRSDTSLTWNSVKGKKSCHTAVDRTAGWNIPMGLLFNQTGSCKFDEYFSQSCAPGSDPRSNLCALCIGDEQGENKCVPNSNERYYGYTGAFRCLAENAGDVAFVKDVTVLQNTDGNNNEAWAKDLKLADFALLCLDGKRKPVTEARSCHLAMAPNHAVVSRMDKVERLKQVLLHQQAKFGRNGSDCPDKFCLFQSETKNLLFNDNTECLARLHGKTTYEKYLGPQYVAGITNLKKCSTSPLLEACEFLRK

SEQ ID NO: 49 - protein, 462 aa, Homo sapiens
MARVLGAPVALGLWSLCWSLAIATPLPPTSAHGNVAEGETKPDPDVTERCSDGWSFDATTLDDNGTMLFFKGEFVWKSHKWDRELISERWKNFPSPVDAAFRQGHNSVFLIKGDKVWVYPPEKKEKGYPKLLQDEFPGIPSPLDAAVECHRGECQAEGVLFFQGDREWFWDLATGTMKERSWPAVGNCSSALRWLGRYYCFQGNQFLRFDPVRGEVPPRYPRDVRDYFMPCPGRGHGHRNGTGHGNSTHHGPEYMRCSPHLVLSALTSDNHGATYAFSGTHYWRLDTSRDGWHSWPIAHQWPQGPSAVDAAFSWEEKLYLVQGTQVYVFLTKGGYTLVSGYPKRLEKEVGTPHGIILDSVDAAFICPGSSRLHIMAGRRLWWLDLKSGAQATWTELPWPHEKVDGALCMEKSLGPNSCSANGPGLYLIHGPNLYCYSDVEKLNAAKALPQPQNVTSLLGCTH

SEQ ID NO: 50 - protein, 147 aa, Homo sapiens
MVMGLGVLLLVFVLGLGLTPPTLAQDNSRYTHFLTQHYDAKPQGRDDRYCESIMRRRGLTSPCKDINTFIHGNKRSIKAICENKNGNPHRENLRISKSSFQVTTCKLHGGSPWPPCQYRATAGFRNVVVACENGLPVHLDQSIFRRP

SEQ ID NO: 51 - protein, 638 aa, Homo sapiens
MILFKQATYFISLFATVSCGCLTQLYENAFFRGGDVASMYTPNAQYCQMRCTFHPRCLLFSFLPASSINDMEKRFGCFLKDSVTGTLPKVHRTGAVSGHSLKQCGHQISACHRDIYKGVDMRGVNFNVSKVSSVEECQKRCTNNIRCQFFSYATQTFHKAEYRNNCLLKYSPGGTPTAIKVLSNVESGFSLKPCALSEIGCHMNIFQHLAFSDVDVARVLTPDAFVCRTICTYHPNCLFFTFYTNVWKIESQRNVCLLKTSESGTPSSSTPQENTISGYSLLTCKRTLPEPCHSKIYPGVDFGGEELNVTFVKGVNVCQETCTKMIRCQFFTYSLLPEDCKEEKCKCFLRLSMDGSPTRIAYGTQGSSGYSLRLCNTGDNSVCTTKTSTRIVGGTNSSWGEWPWQVSLQVKLTAQRHLCGGSLIGHQWVLTAAHCFDGLPLQDVWRIYSGILNLSDITKDTPFSQIKEIIIHQNYKVSEGNHDIALIKLQAPLNYTEFQKPICLPSKGDTSTIYTNCWVTGWGFSKEKGEIQNILQKVNIPLVTNEECQKRYQDYKITQRMVCAGYKEGGKDACKGDSGGPLVCKHNGMWRLVGITSWGEGCARREQPGVYTKVAEYMDWILEKTQSSDGKAQMQSPA

SEQ ID NO: 52 - protein, 597 aa, Homo sapiens
MHPPKTPSGALHRKRKMAAWPFSRLWKVSDPILFQMTLIAALLPAVLGNCGPPPTLSFAAPMDITLTETRFKTGTTLKYTCLPGYVRSHSTQTLTCNSDGEWVYNTFCIYKRCRHPGELRNGQVEIKTDLSFGSQIEFSCSEGFFLIGSTTSRCEVQDRGVGWSHPLPQCEIVKCKPPPDIRNGRHSGEENFYAYGFSVTYSCDPRFSLLGHASISCTVENETIGVWRPSPPTCEKITCRKPDVSHGEMVSGFGPIYNYKDTIVFKCQKGFVLRGSSVIHCDADSKWNPSPPACEPNSCINLPDIPHASWETYPRPTKEDVYVVGTVLRYRCHPGYKPTTDEPTTVICQKNLRWTPYQGCEALCCPEPKLNNGEITQHRKSRPANHCVYFYGDEISFSCHETSRFSAICQGDGTWSPRTPSCGDICNFPPKIAHGHYKQSSSYSFFKEEIIYECDKGYILVGQAKLSCSYSHWSAPAPQCKALCRKPELVNGRLSVDKDQYVEPENVTIQCDSGYGVVGPQSITCSGNRTWYPEVPKCEWETPEGCEQVLTGKRLMQCLPNPEDVKMALEVYKLSLEIEQLELQRDSARQSTLDKEL

SEQ ID NO: 53 - protein, 478 aa, Homo sapiens
MAPLRPLLILALLAWVALADQESCKGRCTEGFNVDKKCQCDELCSYYQSCCTDYTAECKPQVTRGDVFTMPEDEYTVYDDGEEKNNATVHEQVGGPSLTSDLQAQSKGNPEQTPVLKPEEEAPAPEVGASKPEGIDSRPETLHPGRPQPPAEEELCSGKPFDAFTDLKNGSLFAFRGQYCYELDEKAVRPGYPKLIRDVWGIEGPIDAAFTRINCQGKTYLFKGSQYWRFEDGVLDPDYPRNISDGFDGIPDNVDAALALPAHSYSGRERVYFFKGKQYWEYQFQHQPSQEECEGSSLSAVFEHFAMMQRDSWEDIFELLFWGRTSAGTRQPQFISRDWHGVPGQVDAAMAGRIYISGMAPRPSLAKKQRFRHRNRKGYRSQRGHSRGRNQNSRRPSRATWLSLFSSEESNLGANNYDDYRMDWLVPATCEPIQSVFFFSGDKYYRVNLRTRRVDTVDPPYPRSIAQYWLGCPAPGHL

SEQ ID NO: 54 - protein, 527 aa, Homo sapiens
MADSRDPASDQMQHWKEQRAAQKADVLTTGAGNPVGDKLNVITVGPRGPLLVQDVVFTDEMAHFDRERIPERVVHAKGAGAFGYFEVTHDITKYSKAKVFEHIGKKTPIAVRFSTVAGESGSADTVRDPRGFAVKFYTEDGNWDLVGNNTPIFFIRDPILFPSFIHSQKRNPQTHLKDPDMVWDFWSLRPESLHQVSFLFSDRGIPDGHRHMNGYGSHTFKLVNANGEAVYCKFHYKTDQGIKNLSVEDAARLSQEDPDYGIRDLFNAIATGKYPSWTFYIQVMTFNQAETFPFNPFDLTKVWPHKDYPLIPVGKLVLNRNPVNYFAEVEQIAFDPSNMPPGIEASPDKMLQGRLFAYPDTHRHRLGPNYLHIPVNCPYRARVANYQRDGPMCMQDNQGGAPNYYPNSFGAPEQQPSALEHSIQYSGEVRRFNTANDDNVTQVRAFYVNVLNEEQRKRLCENIAGHLKDAQIFIQKKAVKNFTEVHPDYGSHIQALLDKYNAEKPKNAIHTFVQSGSHLAAREKANL

SEQ ID NO: 55 - protein, 461 aa, Homo sapiens
MWQLTSLLLFVATWGISGTPAPLDSVFSSSERAHQVLRIRKRANSFLEELRHSSLERECIEEICDFEEAKEIFQNVDDTLAFWSKHVDGDQCLVLPLEHPCASLCCGHGTCIDGIGSFSCDCRSGWEGRFCQREVSFLNCSLDNGGCTHYCLEEVGWRRCSCAPGYKLGDDLLQCHPAVKFPCGRPWKRMEKKRSHLKRDTEDQEDQVDPRLIDGKMTRRGDSPWQVVLLDSKKKLACGAVLIHPSWVLTAAHCMDESKKLLVRLGEYDLRRWEKWELDLDIKEVFVHPNYSKSTTDNDIALLHLAQPATLSQTIVPICLPDSGLAERELNQAGQETLVTGWGYHSSREKEAKRNRTFVLNFIKIPVVPHNECSEVMSNMVSENMLCAGILGDRQDACEGDSGGPMVASFHGTWFLVGLVSWGEGCGLLHNYGVYTKVSRYLDWIHGHIRDKEAPQKSWAP

SEQ ID NO: 56 - protein, 364 aa, Homo sapiens
MPYQYPALTPEQKKELSDIAHRIVAPGKGILAADESTGSIAKRLQSIGTENTEENRRFYRQLLLTADDRVNPCIGGVILFHETLYQKADDGRPFPQVIKSKGGVVGIKVDKGVVPLAGTNGETTTQGLDGLSERCAQYKKDGADFAKWRCVLKIGEHTPSALAIMENANVLARYASICQQNGIVPIVEPEILPDGDHDLKRCQYVTEKVLAAVYKALSDHHIYLEGTLLKPNMVTPGHACTQKFSHEEIAMATVTALRRTVPPAVTGITFLSGGQSEEEASINLNAINKCPLLKPWALTFSYGRALQASALKAWGGKKENLKAAQEEYVKRALANSLACQGKYTPSGQAGAAASESLFVSNHAY

SEQ ID NO: 57 - protein, 440 aa, Homo sapiens
MGPPGSPWQWVTLLLGLLLPPAAPFWLLNVLFPPHTTPKAELSNHTRPVILVPGCLGNQLEAKLDKPDVVNWMCYRKTEDFFTIWLDLNMFLPLGVDCWIDNTRVVYNRSSGLVSNAPGVQIRVPGFGKTYSVEYLDSSKLAGYLHTLVQNLVNNGYVRDETVRAAPYDWRLEPGQQEEYYRKLAGLVEEMHAAYGKPVFLIGHSLGCLHLLYFLLRQPQAWKDRFIDGFISLGAPWGGSIKPMLVLASGDNQGIPIMSSIKLKEEQRITTTSPWMFPSRMAWPEDHVFISTPSFNYTGRDFQRFFADLHFEEGWYMWLQSRDLLAGLPAPGVEVYCLYGVGLPTPRTYIYDHGFPYTDPVGVLYEDGDDTVATRSTELCGLWQGRQPQPVHLLPLHGIQHLNMVFSNLTLEHINAILLGAYRQGPPASPTASPEPPPPE

SEQ ID NO: 58 - protein, 525 aa, Homo sapiens
MKALIAALLLITLQYSCAVSPTDCSAVEPEAEKALDLINKRRRDGYLFQLLRIADAHLDRVENTTVYYLVLDVQESDCSVLSRKYWNDCEPPDSRRPSEIVIGQCKVIATRHSHESQDLRVIDFNCTTSSVSSALANTKDSPVLIDFFEDTERYRKQANKALEKYKEENDDFASFRVDRIERVARVRGGEGTGYFVDFSVRNCPRHHFPRHPNVFGFCRADLFYDVEALDLESPKNLVINCEVFDPQEHENINGVPPHLGHPFHWGGHERSSTTKPPFKPHGSRDHHHPHKPHEHGPPPPPDERDHSHGPPLPQGPPPLLPMSCSSCQHATFGTNGAQRHSHNNNSSDLHPHKHHSHEQHPHGHHPHAHHPHEHDTHRQHPHGHHPHGHHPHGHHPHGHHPHGHHPHCHDFQDYGPCDPPPHNQGHCCHGHGPPPGHLRRRGPGKGPRPFHCRQIGSVYRLPPLRKGEVLPLPEANFPSFPLPHHKHPLKPDNQPFPQSVSESCPGKFKSGFPQVSMFFTHTFPK

SEQ ID NO: 59 - protein, 495 aa, Homo sapiens
MSMLVVFLLLWGVTWGPVTEAAIFYETQPSLWAESESLLKPLANVTLTCQAHLETPDFQLFKNGVAQEPVHLDSPAIKHQFLLTGDTQGRYRCRSGLSTGWTQLSKLLELTGPKSLPAPWLSMAPVSWITPGLKTTAVCRGVLRGVTFLLRREGDHEFLEVPEAQEDVEATFPVHQPGNYSCSYRTDGEGALSEPSATVTIEELAAPPPPVLMHHGESSQVLHPGNKVTLTCVAPLSGVDFQLRRGEKELLVPRSSTSPDRIFFHLNAVALGDGGHYTCRYRLHDNQNGWSGDSAPVELILSDETLPAPEFSPEPESGRALRLRCLAPLEGARFALVREDRGGRRVHRFQSPAGTEALFELHNISVADSANYSCVYVDLKPPFGGSAPSERLELHVDGPPPRPQLRATWSGAVLAGRDAVLRCEGPIPDVTFELLREGETKAVKTVRTPGAAANLELIFVGPQHAGNYRCRYRSWVPHTFESELSDPVELLVAES

SEQ ID NO: 60 - protein, 2813 aa, Homo sapiens
MIPARFAGVLLALALILPGTLCAEGTRGRSSTARCSLFGSDFVNTFDGSMYSFAGYCSYLLAGGCQKRSFSIIGDFQNGKRVSLSVYLGEFFDIHLFVNGTVTQGDQRVSMPYASKGLYLETEAGYYKLSGEAYGFVARIDGSGNFQVLLSDRYFNKTCGLCGNFNIFAEDDFMTQEGTLTSDPYDFANSWALSSGEQWCERASPPSSSCNISSGEMQKGLWEQCQLLKSTSVFARCHPLVDPEPFVALCEKTLCECAGGLECACPALLEYARTCAQEGMVLYGWTDHSACSPVCPAGMEYRQCVSPCARTCQSLHINEMCQERCVDGCSCPEGQLLDEGLCVESTECPCVHSGKRYPPGTSLSRDCNTCICRNSQWICSNEECPGECLVTGQSHFKSFDNRYFTFSGICQYLLARDCQDHSFSIVIETVQCADDRDAVCTRSVTVRLPGLHNSLVKLKHGAGVAMDGQDVQLPLLKGDLRIQHTVTASVRLSYGEDLQMDWDGRGRLLVKLSPVYAGKTCGLCGNYNGNQGDDFLTPSGLAEPRVEDFGNAWKLHGDCQDLQKQHSDPCALNPRMTRFSEEACAVLTSPTFEACHRAVSPLPYLRNCRYDVCSCSDGRECLCGALASYAAACAGRGVRVAWREPGRCELNCPKGQVYLQCGTPCNLTCRSLSYPDEECNEACLEGCFCPPGLYMDERGDCVPKAQCPCYYDGEIFQPEDIFSDHHTMCYCEDGFMHCTMSGVPGSLLPDAVLSSPLSHRSKRSLSCRPPMVKLVCPADNLRAEGLECTKTCQNYDLECMSMGCVSGCLCPPGMVRHENRCVALERCPCFHQGKEYAPGETVKIGCNTCVCQDRKWNCTDHVCDATCSTIGMAHYLTFDGLKYLFPGECQYVLVQDYCGSNPGTFRILVGNKGCSHPSVKCKKRVTILVEGGEIELFDGEVNVKRPMKDETHFEVVESGRYIILLLGKALSVVWDRHLSISVVLKQTYQEKVCGLCGNFDGIQNNDLTSSNLQVEEDPVDFGNSWKVSSQCADTRKVPLDSSPATCHNNIMKQTMVDSSCRILTSDVFQDCNKLVDPEPYLDVCIYDTCSCESIGDCACFCDTIAAYAHVCAQHGKVVTWRTATLCPQSCEERNLRENGYECEWRYNSCAPACQVTCQHPEPLACPVQCVEGCHAHCPPGKILDELLQTCVDPEDCPVCEVAGRRFASGKKVTLNPSDPEHCQICHCDVVNLTCEACQEPGGLVVPPTDAPVSPTTLYVEDISEPPLHDFYCSRLLDLVFLLDGSSRLSEAEFEVLKAFVVDMMERLRISQKWVRVAVVEYHDGSHAYIGLKDRKRPSELRRIASQVKYAGSQVASTSEVLKYTLFQIFSKIDRPEASRITLLLMASQEPQRMSRNFVRYVQGLKKKKVIVIPVGIGPHANLKQIRLIEKQAPENKAFVLSSVDELEQQRDEIVSYLCDLAPEAPPPTLPPDMAQVTVGPGLLGVSTLGPKRNSMVLDVAFVLEGSDKIGEADFNRSKEFMEEVIQRMDVGQDSIHVTVLQYSYMVTVEYPFSEAQSKGDILQRVREIRYQGGNRTNTGLALRYLSDHSFLVSQGDREQAPNLVYMVTGNPASDEIKRLPGDIQVVPIGVGPNANVQELERIGWPNAPILIQDFETLPREAPDLVLQRCCSGEGLQIPTLSPAPDCSQPLDVILLLDGSSSFPASYFDEMKSFAKAFISKANIGPRLTQVSVLQYGSITTIDVPWNVVPEKAHLLSLVDVMQREGGPSQIGDALGFAVRYLTSEMHGARPGASKAVVILVTDVSVDSVDAAADAARSNRVTVFPIGIGDRYDAAQLRILAGPAGDSNVVKLQRIEDLPTMVTLGNSFLHKLCSGFVRICMDEDGNEKRPGDVWTLPDQCHTVTCQPDGQTLLKSHRVNCDRGLRPSCPNSQSPVKVEETCGCRWTCPCVCTGSSTRHIVTFDGQNFKLTGSCSYVLFQNKEQDLEVILHNGACSPGARQGCMKSIEVKHSALSVELHSDMEVTVNGRLVSVPYVGGNMEVNVYGAIMHEVRFNHLGHIFTFTPQNNEFQLQLSPKTFASKTYGLCGICDENGANDFMLRDGTVTTDWKTLVQEWTVQRPGQTCQPILEEQCLVPDSSHCQVLLLPLFAECHKVLAPATFYAICQQDSCHQEQVCEVIASYAHLCRTNGVCVDWRTPDFCAMSCPPSLVYNHCEHGCPRHCDGNVSSCGDHPSEGCFCPPDKVMLEGSCVPEEACTQCIGEDGVQHQFLEAWVPDHQPCQICTCLSGRKVNCTTQPCPTAKAPTCGLCEVARLRQNADQCCPEYECVCDPVSCDLPPVPHCERGLQPTLTNPGECRPNFTCACRKEECKRVSPPSCPPHRLPTLRKTQCCDEYECACNCVNSTVSCPLGYLASTATNDCGCTTTTCLPDKVCVHRSTIYPVGQFWEEGCDVCTCTDMEDAVMGLRVAQCSQKPCEDSCRSGFTYVLHEGECCGRCLPSACEVVTGSPRGDSQSSWKSVGSQWASPENPCLINECVRVKEEVFIQQRNVSCPQLEVPVCPSGFQLSCKTSACCPSCRCERMEACMLNGTVIGPGKTVMIDVCTTCRCMVQVGVISGFKLECRKTTCNPCPLGYKEENNTGECCGRCLPTACTIQLRGGQIMTLKRDETLQDGCDTHFCKVNERGEYFWEKRVTGCPPFDEHKCLAEGGKIMKIPGTCCDTCEEPECNDITARLQYVKVGSCKSEVEVDIHYCQGKCASKAMYSIDINDVQDQCSCCSPTRTEPMQVALHCTNGSVVYHEVLNAMECKCSPRKCSK

SEQ ID NO: 61 - protein, 335 aa, Homo sapiens
MGKVKVGVNGFGRIGRLVTRAAFNSGKVDIVAINDPFIDLNYMVYMFQYDSTHGKFHGTVKAENGKLVINGNPITIFQERDPSKIKWGDAGAEYVVESTGVFTTMEKAGAHLQGGAKRVIISAPSADAPMFVMGVNHEKYDNSLKIISNASCTTNCLAPLAKVIHDNFGIVEGLMTTVHAITATQKTVDGPSGKLWRDGRGALQNIIPASTGAAKAVGKVIPELNGKLTGMAFRVPTANVSVVDLTCRLEKPAKYDDIKKVVKQASEGPLKGILGYTEHQVVSSDFNSDTHSSTFDAGAGIALNDHFVKLISWYDNEFGYSNRVVDLMAHMASKE

SEQ ID NO: 62 - protein, 189 aa, Homo sapiens
MVMLLLLLSALAGLFGAAEGQAFHLGKCPNPPVQENFDVNKYLGRWYEIEKIPTTFENGRCIQANYSLMENGKIKVLNQELRADGTVNQIEGEATPVNLTEPAKLEVKFSWFMPSAPYWILATDYENYALVYSCTCIIQLFHVDFAWILARNPNLPPETVDSLKNILTSNNIDVKKMTVTDQVNCPKLS

SEQ ID NO: 63 - protein, 402 aa, Homo sapiens [sequence omitted]

SEQ ID NO: 64 - protein, 406 aa, Homo sapiens
MQLFLLLCLVLLSPQGASLHRHHPREMKKRVEDLHVGATVAPSSRRDFTFDLYRALASAAPSQSIFFSPVSISMSLAMLSLGAGSSTKMQILEGLGLNLQKSSEKELHRGFQQLLQELNQPRDGFQLSLGNALFTDLVVDLQDTFVSAMKTLYLADTFPTNFRDSAGAMKQINDYVAKQTKGKIVDLLKNLDSNAVVIMVNYIFFKAKWETSFNHKGTQEQDFYVTSETVVRVPMMSREDQYHYLLDRNLSCRVVGVPYQGNATALFILPSEGKMQQVENGLSEKTLRKWLKMFKKRQLELYLPKFSIEGSYQLEKVLPSLGISNVFTSHADLSGISNHSNIQVSEMVHKAVVEVDESGTRAAAATGTIFTFRSARLNSQRLVFNRPFLMFIVDNNILFLGKVNRP

SEQ ID NO: 65 - protein, 500 aa, Homo sapiens
MASRLTLLTLLLLLLAGDRASSNPNATSSSSQDPESLQDRGEGKVATTVISKMLFVEPILEVSSLPTTNSTTNSATKITANTTDEPTTQPTTEPTTQPTIQPTQPTTQLPTDSPTQPTTGSFCPGPVTLCSDLESHSTEAVLGDALVDFSLKLYHAFSAMKKVETNMAFSPFSIASLLTQVLLGAGENTKTNLESILSYPKDFTCVHQALKGFTTKGVTSVSQIFHSPDLAIRDTFVNASRTLYSSSPRVLSNNSDANLELINTWVAKNTNNKISRLLDSLPSDTRLVLLNAIYLSAKWKTTFDPKKTRMEPFHFKNSVIKVPMMNSKKYPVAHFIDQTLKAKVGQLQLSHNLSLVILVPQNLKHRLEDMEQALSPSVFKAIMEKLEMSKFQPTLLTLPRIKVTTSQDMLSIMEKLEFFDFSYDLNLCGLTEDPDLQVSAMQHQTVLELTETGVEAAAASAISVARTLLVFEVQQPFLFVLWDQQHKFPVFMGRVYDPRA

SEQ ID NO: 66 - protein, 583 aa, Homo sapiens
MKLLHVFLLFLCFHLRFCKVTYTSQEDLVEKKCLAKKYTHLSCDKVFCQPWQRCIEGTCVCKLPYQCPKNGTAVCATNRRSFPTYCQQKSLECLHPGTKFLNNGTCTAEGKFSVSLKHGNTDSEGIVEVKLVDQDKTMFICKSSWSMREANVACLDLGFQQGADTQRRFKLSDLSINSTECLHVHCRGLETSLAECTFTKRRTMGYQDFADVVCYTQKADSPMDDFFQCVNGKYISQMKACDGINDCGDQSDELCCKACQGKGFHCKSGVCIPSQYQCNGEVDCITGEDEVGCAGFASVTQEETEILTADMDAERRRIKSLLPKLSCGVKNRMHIRRKRIVGGKRAQLGDLPWQVAIKDASGITCGGIYIGGCWILTAAHCLRASKTHRYQIWTTVVDWIHPDLKRIVIEYVDRIIFHENYNAGTYQNDIALIEMKKDGNKKDCELPRSIPACVPWSPYLFQPNDTCIVSGWGREKDNERVFSLQWGEVKLISNCSKFYGNRFYEKEMECAGTYDGSIDACKGDSGGPLVCMDANNVTYVWGVVSWGENCGKPEFPGVYTKVANYFDWISYHVGRPFISQYNV

SEQ ID NO: 67 - protein, 661 aa, Homo sapiens
MRLKNLTFIIILIISGELYAEEKPCGFPHVENGRIAQYYYTFKSFYFPMSIDKKLSFFCLAGYTTESGRQEEQTTCTTEGWSPEPRCFKKCTKPDLSNGYISDVKLLYKIQENMRYGCASGYKTTGGKDEEVVQCLSDGWSSQPTCRKEHETCLAPELYNGNYSTTQKTFKVKDKVQYECATGYYTAGGKKTEEVECLTYGWSLTPKCTKLKCSSLRLIENGYFHPVKQTYEEGDVVQFFCHENYYLSGSDLIQCYNFGWYPESPVCEGRRNRCPPPPLPINSKIQTHSTTYRHGEIVHIECELNFEIHGSAEIRCEDGKWTEPPKCIEGQEKVACEEPPFIENGAANLHSKIYYNGDKVTYACKSGYLLHGSNEITCNRGKWTLPPECVENNENCKHPPVVMNGAVADGILASYATGSSVEYRCNEYYLLRGSKISRCEQGKWSSPPVCLEPCTVNVDYMNRNNIEMKWKYEGKVLHGDLIDFVCKQGYDLSPLTPLSELSVQCNRGEVKYPLCTRKESKGMCTSPPLIKHGVIISSTVDTYENGSSVEYRCFDHHFLEGSREAYCLDGMWTTPPLCLEPCTLSFTEMEKNNLLLKWDFDNRPHILHGEYIEFICRGDTYPAELYITGSILRMQCDRGQLKYPRCIPRQSTLSYQEPLRT

SEQ ID NO: 68 - protein, 202 aa, Homo sapiens
MELWGAYLLLCLFSLLTQVTTEPPTQKPKKIVNAKKDVVNTKMFEELKSRLDTLAQEVALLKEQQALQTVCLKGTKVHMKCFLAFTQTKTFHEASEDCISRGGTLGTPQTGSENDALYEYLRQSVGNEAEIWLGLNDMAAEGTWVDMTGARIAYKNWETEITAQPDGGKTENCAVLSGAANGKWFDKRCRDQLPYICQFGIV

SEQ ID NO: 69 - protein, 499 aa, Homo sapiens
MKHSLNALLIFLIITSAWGGSKGPLDQLEKGGETAQSADPQWEQLNNKNLSMPLLPADFHKENTVTNDWIPEGEEDDDYLDLEKIFSEDDDYIDIVDSLSVSPTDSDVSAGNILQLFHGKSRIQRLNILNAKFAFNLYRVLKDQVNTFDNIFIAPVGISTAMGMISLGLKGETHEQVHSILHFKDFVNASSKYEITTIHNLFRKLTHRLFRRNFGYTLRSVNDLYIQKQFPILLDFKTKVREYYFAEAQIADFSDPAFISKTNNHIMKLTKGLIKDALENIDPATQMMILNCIYFKGSWVNKFPVEMTHNHNFRLNEREVVKVSMMQTKGNFLAANDQELDCDILQLEYVGGISMLIVVPHKMSGMKTLEAQLTPRVVERWQKSMTNRTREVLLPKFKLEKNYNLVESLKLMGIRMLFDKNGNMAGISDQRIAIDLFKHQGTITVNEEGTQATTVTTVGFMPLSTQVRFTVDRPFLFLIYEHRTSCLLFMGRVANPSRS

SEQ ID NO: 70 - protein, 782 aa, Homo sapiens
MAPHRPAPALLCALSLALCALSLPVRAATASRGASQAGAPQGRVPEARPNSMVVEHPEFLKAGKEPGLQIWRVEKFDLVPVPTNLYGDFFTGDAYVILKTVQLRNGNLQYDLHYWLGNECSQDESGAAAIFTVQLDDYLNGRAVQHREVQGFESATFLGYFKSGLKYKKGGVASGFKHVVPNEVVVQRLFQVKGRRVVRATEVPVSWESFNNGDCFILDLGNNIHQWCGSNSNRYERLKATQVSKGIRDNERSGRARVHVSEEGTEPEAMLQVLGPKPALPAGTEDTAKEDAANRKLAKLYKVSNGAGTMSVSLVADENPFAQGALKSEDCFILDHGKDGKIFVWKGKQANTEERKAALKTASDFITKMDYPKQTQVSVLPEGGETPLFKQFFKNWRDPDQTDGLGLSYLSSHIANVERVPFDAATLHTSTAMAAQHGMDDDGTGQKQIWRIEGSNKVPVDPATYGQFYGGDSYIILYNYRHGGRQGQIIYNWQGAQSTQDEVAASAILTAQLDEELGGTPVQSRVVQGKEPAHLMSLFGGKPMIIYKGGTSREGGQTAPASTRLFQVRANSAGATRAVEVLPKAGALNSNDAFVLKTPSAAYLWVGTGASEAEKTGAQELLRVLRAQPVQVAEGSEPDGFWEALGGKAAYRTSPRLKDKKMDAHPPRLFACSNKIGRFVIEEVPGELMQEDLATDDVMLLDTWDQVFVWVGKDSQEEEKTEALTSAKRYIETDPANRDRRTPITVVKQGFEPPSFVGWFLGWDDDYWSVDPLDRAMAELAA

SEQ ID NO: 71 - protein, 752 aa, Homo sapiens
MGPLMVLFCLLFLYPGLADSAPSCPQNVNISGGTFTLSHGWAPGSLLTYSCPQGLYPSPASRLCKSSGQWQTPGATRSLSKAVCKPVRCPAPVSFENGIYTPRLGSYPVGGNVSFECEDGFILRGSPVRQCRPNGMWDGETAVCDNGAGHCPNPGISLGAVRTGFRFGHGDKVRYRCSSNLVLTGSSERECQGNGVWSGTEPICRQPYSYDFPEDVAPALGTSFSHMLGATNPTQKTKESLGRKIQIQRSGHLNLYLLLDCSQSVSENDFLIFKESASLMVDRIFSFEINVSVAIITFASEPKVLMSVLNDNSRDMTEVISSLENANYKDHENGTGTNTYAALNSVYLMMNNQMRLLGMETMAWQEIRHAIILLTDGKSNMGGSPKTAVDHIREILNINQKRNDYLDIYAIGVGKLDVDWRELNELGSKKDGERHAFILQDTKALHQVFEHMLDVSKLTDTICGVGNMSANASDQERTPWHVTIKPKSQETCRGALISDQWVLTAAHCFRDGNDHSLWRVNVGDPKSQWGKEFLIEKAVISPGFDVFAKKNQGILEFYGDDIALLKLAQKVKMSTHARPICLPCTMEANLALRRPQGSTCRDHENELLNKQSVPAHFVALNGSKLNINLKMGVEWTSCAEVVSQEKTMFPNLTDVREVVTDQFLCSGTQEDESPCKGESGGAVFLERRFRFFQVGLVSWGLYNPCLGSADKNSRKRAPRSKVPPPRDFHINLFRMQPWLRQHLGDVLNFLPL

SEQ ID NO: 72 - protein, 396 aa, Homo sapiens [sequence omitted]

SEQ ID NO: 73 - protein, 434 aa, Homo sapiens
MSILKIHAREIFDSRGNPTVEVDLFTSKGLFRAAVPSGASTGIYEALELRDNDKTRYMGKGVSKAVEHINKTIAPALVSKKLNVTEQEKIDKLMIEMDGTENKSKFGANAILGVSLAVCKAGAVEKGVPLYRHIADLAGNSEVILPVPAFNVINGGSHAGNKLAMQEFMILPVGAANFREAMRIGAEVYHNLKNVIKEKYGKDATNVGDEGGFAPNILENKEGLELLKTAIGKAGYTDKVVIGMDVAASEFFRSGKYDLDFKSPDDPSRYISPDQLADLYKSFIKDYPVVSIEDPFDQDDWGAWQKFTASAGIQVVGDDLTVTNPKRIAKAVNEKSCNCLLLKVNQIGSVTESLQACKLAQANGWGVMVSHRSGETEDTFIADLVVGLCTGQIKTGAPCRSERLAKYNQLLRIEEELGSKAKFAGRNFRNPLAK

SEQ ID NO: 74 - protein, 285 aa, Homo sapiens
MMEAIKKKMQMLKLDKENALDRAEQAEAEQKQAEERSKQLEDELAAMQKKLKGTEDELDKYSEALKDAQEKLELAEKKAADAEAEVASLNRRIQLVEEELDRAQERLATALQKLEEAEKAADESERGMKVIENRALKDEEKMELQEIQLKEAKHIAEEADRKYEEVARKLVIIEGDLERTEERAELAESKCSELEEELKNVTNNLKSLEAQAEKYSQKEDKYEEEIKILTDKLKEAETRAEFAERSVAKLEKTIDDLEDELYAQKLKYKAISEELDHALNDMTSI

SEQ ID NO: 75 - protein, 334 aa, Homo sapiens
MATLKEKLIAPVAEEEATVPNNKITVVGVGQVGMACAISILGKSLADELALVDVLEDKLKGEMMDLQHGSLFLQTPKIVADKDYSVTANSKIVVVTAGVRQQEGESRLNLVQRNVNVFKFIIPQIVKYSPDCIIIVVSNPVDILTYVTWKLSGLPKHRVIGSGCNLDSARFRYLMAEKLGIHPSSCHGWILGEHGDSSVAVWSGVNVAGVSLQELNPEMGTDNDSENWKEVHKMVVESAYEVIKLKGYTNWAIGLSVADLIESMLKNLSRIHPVSTMVKGMYGIENEVFLSLPCILNARGLTSVINQKLKDDEVAQLKKSADTLWDIQKDLKDL

SEQ ID NO: 76 - protein, 339 aa, Homo sapiens
MSTVHEILCKLSLEGDHSTPPSAYGSVKAYTNFDAERDALNIETAIKTKGVDEVTIVNILTNRSNAQRQDIAFAYQRRTKKELASALKSALSGHLETVILGLLKTPAQYDASELKASMKGLGTDEDSLIEIICSRTNQELQEINRVYKEMYKTDLEKDIISDTSGDFRKLMVALAKGRRAEDGSVIDYELIDQDARDLYDAGVKRKGTDVPKWISIMTERSVPHLQKVFDRYKSYSPYDMLESIRKEVKGDLENAFLNLVQCIQNKPLYFADRLYDSMKGKGTRDKVLIRIMVSRSEVDMLKIRSEFKRKYGKSLYYYIQQDTKGDYQKALLYLCGGDD

SEQ ID NO: 77 - protein, 584 aa, Homo sapiens
MFAVVFFILSLMTCQPGVTAQEKVNQRVRRAATPAAVTCQLSNWSEWTDCFPCQDKKYRHRSLLQPNKFGGTICSGDIWDQASCSSSTTCVRQAQCGQDFQCKETGRCLKRHLVCNGDQDCLDGSDEDDCEDVRAIDEDCSQYEPIPGSQKAALGYNILTQEDAQSVYDASYYGGQCETVYNGEWRELRYDSTCERLYYGDDEKYFRKPYNFLKYHFEALADTGISSEFYDNANDLLSKVKKDKSDSFGVTIGIGPAGSPLLVGVGVSHSQDTSFLNELNKYNEKKFIFTRIFTKVQTAHFKMRKDDIMLDEGMLQSLMELPDQYNYGMYAKFINDYGTHYITSGSMGGIYEYILVIDKAKMESLGITSRDITTCFGGSLGIQYEDKINVGGGLSGDHCKKFGGGKTERARKAMAVEDIISRVRGGSSGWSGGLAQNRSTITYRSWGRSLKYNPVVIDFEMQPIHEVLRHTSLGPLEAKRQNLRRALDQYLMEFNACRCGPCFNNGVPILEGTSCRCQCRLGSLGAACEQTQTEGAKADGSWSCWSSWSVCRAGIQERRRECDNPAPQNGGASCPGRKVQTQAC

SEQ ID NO: 78 - protein, 591 aa, Homo sapiens
MKNSRTWAWRAPVELFLLCAALGCLSLPGSRGERPHSFGSNAVNKSFAKSRQMRSVDVTLMPIDCELSSWSSWTTCDPCQKKRYRYAYLLQPSQFHGEPCNFSDKEVEDCVTNRPCRSQVRCEGFVCAQTGRCVNRRLLCNGDNDCGDQSDEANCRRIYKKCQHEMDQYWGIGSLASGINLFTNSFEGPVLDHRYYAGGCSPHYILNTRFRKPYNVESYTPQTQGKYEFILKEYESYSDFERNVTEKMASKSGFSFGFKIPGIFELGISSQSDRGKHYIRRTKRFSHTKSVFLHARSDLEVAHYKLKPRSLMLHYEFLQRVKRLPLEYSYGEYRDLFRDFGTHYITEAVLGGIYEYTLVMNKEAMERGDYTLNNVHACAKNDFKIGGAIEEVYVSLGVSVGKCRGILNEIKDRNKRDTMVEDLVVLVRGGASEHITTLAYQELPTADLMQEWGDAVQYNPAIIKVKVEPLYELVTATDFAYSSTVRQNMKQALEEFQKEVSSCHCAPCQGNGVPVLKGSRCDCICPVGSQGLACEVSYRKNTPIDGKWNCWSNWSSCSGRRKTRQRQCNNPPPQNGGSPCSGPASETLDCS

SEQ ID NO: 79 - protein, 202 aa, Homo sapiens
MLPPGTATLLTLLLAAGSLGQKPQRPRRPASPISTIQPKANFDAQQFAGTWLLVAVGSACRFLQEQGHRAEATTLHVAPQGTAMAVSTFRKLDGICWQVRQLYGDTGVLGRFLLQARDARGAVHVVVAETDYQSFAVLYLERAGQLSVKLYARSLPVSDSVLSGFEQRVQEAHLTEDQIFYFPKYGFCEAADQFHVLDEVRR

SEQ ID NO: 80 - protein, 333 aa, Homo sapiens [sequence omitted]

SEQ ID NO: 81 - protein, 1170 aa, Homo sapiens
MGLAWGLGVLFLMHVCGTNRIPESGGDNSVFDIFELTGAARKGSGRRLVKGPDPSSPAFRIEDANLIPPVPDDKFQDLVDAVRAEKGFLLLASLRQMKKTRGTLLALERKDHSGQVFSVVSNGKAGTLDLSLTVQGKQHVVSVEEALLATGQWKSITLFVQEDRAQLYIDCEKMENAELDVPIQSVFTRDLASIARLRIAKGGVNDNFQGVLQNVRFVFGTTPEDILRNKGCSSSTSVLLTLDNNVVNGSSPAIRTNYIGHKTKDLQAICGISCDELSSMVLELRGLRTIVTTLQDSIRKVTEENKELANELRRPPLCYHNGVQYRNNEEWTVDSCTECHCQNSVTICKKVSCPIMPCSNATVPDGECCPRCWPSDSADDGWSPWSEWTSCSTSCGNGIQQRGRSCDSLNNRCEGSSVQTRTCHIQECDKRFKQDGGWSHWSPWSSCSVTCGDGVITRIRLCNSPSPQMNGKPCEGEARETKACKKDACPINGGWGPWSPWDICSVTCGGGVQKRSRLCNNPTPQFGGKDCVGDVTENQICNKQDCPIDGCLSNPCFAGVKCTSYPDGSWKCGACPPGYSGNGIQCTDVDECKEVPDACFNHNGEHRCENTDPGYNCLPCPPRFTGSQPFGQGVEHATANKQVCKPRNPCTDGTHDCNKNAKCNYLGHYSDPMYRCECKPGYAGNGIICGEDTDLDGWPNENLVCVANATYHCKKDNCPNLPNSGQEDYDKDGIGDACDDDDDNDKIPDDRDNCPFHYNPAQYDYDRDDVGDRCDNCPYNHNPDQADTDNNGEGDACAADIDGDGILNERDNCQYVYNVDQRDTDMDGVGDQCDNCPLEHNPDQLDSDSDRIGDTCDNNQDIDEDGHQNNLDNCPYVPNANQADHDKDGKGDACDHDDDNDGIPDDKDNCRLVPNPDQKDSDGDGRGDACKDDFDHDSVPDIDDICPENVDISETDFRRFQMIPLDPKGTSQNDPNWVVRHQGKELVQTVNCDPGLAVGYDEFNAVDFSGTFFINTERDDDYAGFVFGYQSSSRFYVVMWKQVTQSYWDTNPTRAQGYSGLSVKVVNSTTGPGEHLRNALWHTGNTPGQVRTLWHDPRHIGWKDFTAYRWRLSHRPKTGFIRVVMYEGKKIMADSGPIYDKTYAGGRLGLFVFSQEMVFFSDLKYECRDP

SEQ ID NO: 82 - protein, 1366 aa, Homo sapiens
MLSFVDTRTLLLLAVTLCLATCQSLQEETVRKGPAGDRGPRGERGPPGPPGRDGEDGPTGPPGPPGPPGPPGLGGNFAAQYDGKGVGLGPGPMGLMGPRGPPGAAGAPGPQGFQGPAGEPGEPGQTGPAGARGPAGPPGKAGEDGHPGKPGRPGERGVVGPQGARGFPGTPGLPGFKGIRGHNGLDGLKGQPGAPGVKGEPGAPGENGTPGQTGARGLPGERGRVGAPGPAGARGSDGSVGPVGPAGPIGSAGPPGFPGAPGPKGEIGAVGNAGPAGPAGPRGEVGLPGLSGPVGPPGNPGANGLTGAKGAAGLPGVAGAPGLPGPRGIPGPVGAAGATGARGLVGEPGPAGSKGESGNKGEPGSAGPQGPPGPSGEEGKRGPNGEAGSAGPPGPPGLRGSPGSRGLPGADGRAGVMGPPGSRGASGPAGVRGPNGDAGRPGEPGLMGPRGLPGSPGNIGPAGKEGPVGLPGIDGRPGPIGPAGARGEPGNIGFPGPKGPTGDPGKNGDKGHAGLAGARGAPGPDGNNGAQGPPGPQGVQGGKGEQGPPGPPGFQGLPGPSGPAGEVGKPGERGLHGEFGLPGPAGPRGERGPPGESGAAGPTGPIGSRGPSGPPGPDGNKGEPGVVGAVGTAGPSGPSGLPGERGAAGIPGGKGEKGEPGLRGEIGNPGRDGARGAPGAVGAPGPAGATGDRGEAGAAGPAGPAGPRGSPGERGEVGPAGPNGFAGPAGAAGQPGAKGERGAKGPKGENGVVGPTGPVGAAGPAGPNGPPGPAGSRGDGGPPGMTGFPGAAGRTGPPGPSGISGPPGPPGPAGKEGLRGPRGDQGPVGRTGEVGAVGPPGFAGEKGPSGEAGTAGPPGTPGPQGLLGAPGILGLPGSRGERGLPGVAGAVGEPGPLGIAGPPGARGPPGAVGSPGVNGAPGEAGRDGNPGNDGPPGRDGQPGHKGERGYPGNIGPVGAAGAPGPHGPVGPAGKHGNRGETGPSGPVGPAGAVGPRGPSGPQGIRGDKGEPGEKGPRGLPGLKGHNGLQGLPGIAGHHGDQGAPGSVGPAGPRGPAGPSGPAGKDGRTGHPGTVGPAGIRGPQGHQGPAGPPGPPGPPGPPGVSGGGYDFGYDGDFYRADQPRSAPSLRPKDYEVDATLKSLNNQIETLLTPEGSRKNPARTCRDLRLSHPEWSSGYYWIDPNQGCTMDAIKVYCDFSTGETCIRAQPENIPAKNWYRSSKDKKHVWLGETINAGSQFEYNVEGVTSKEMATQLAFMRLLANYASQNITYHCKNSIAYMDEETGNLKKAVILQGSNDVELVAEGNSRFTYTVLVDGCSKKTNEWGKTIIEYKTNKPSRLPFLDIAPLDIGGADQEFFVDIGPVCFK

SEQ ID NO: 83 - protein, 491 aa, Homo sapiens
MALLWGLLVLSWSCLQGPCSVFSPVSAMEPLGRQLTSGPNQEQVSPLTLLKLGNQEPGGQTALKSPPGVCSRDPTPEQTHRLARAMMAFTADLFSLVAQTSTCPNLILSPLSVALALSHLALGAQNHTLQRLQQVLHAGSGPCLPHLLSRLCQDLGPGAFRLAARMYLQKGFPIKEDFLEQSEQLFGAKPVSLTGKQEDDLANINQWVKEATEGKIQEFLSGLPEDTVLLLLNAIHFQGFWRNKFDPSLTQRDSFHLDEQFTVPVEMMQARTYPLRWFLLEQPEIQVAHFPFKNNMSFVVLVPTHFEWNVSQVLANLSWDTLHPPLVWERPTKVRLPKLYLKHQMDLVATLSQLGLQELFQAPDLRGISEQSLVVSGVQHQSTLELSEVGVEAAAATSIAMSRMSLSSFSVNRPFLFFIFEDTTGLPLFVGSVRNPNPSAPRELKEQQDSPGNKDFLQSLKGFPRGDKLFGPDLKLVPPMEEDYPQFGSPK

SEQ ID NO: 84 - protein, 259 aa, Homo sapiens
MSEVPVARVWLVLLLLTVQVGVTAGAPWQCAPCSAEKLALCPPVSASCSEVTRSAGCGCCPMCALPLGAACGVATARCARGLSCRALPGEQQPLHALTRGQGACVQESDASAPHAAEAGSPESPESTEITEEELLDNFHLMAPSEEDHSILWDAISTYDGSKALHVTNIKKWKEPCRIELYRVVESLAKAQETSGEEISKFYLPNCNKNGFYHSRQCETSMDGEAGLCWCVYPWNGKRIPGSPEIRGDPNCQIYFNVQN

SEQ ID NO: 85 - protein, 688 aa, Homo sapiens
MWCIVLFSLLAWVYAEPTMYGEILSPNYPQAYPSEVEKSWDIEVPEGYGIHLYFTHLDIELSENCAYDSVQIISGDTEEGRLCGQRSSNNPHSPIVEEFQVPYNKLQVIFKSDFSNEERFTGFAAYYVATDINECTDFVDVPCSHFCNNFIGGYFCSCPPEYFLHDDMKNCGVNCSGDVFTALIGEIASPNYPKPYPENSRCEYQIRLEKGFQVVVTLRREDFDVEAADSAGNCLDSLVFVAGDRQFGPYCGHGFPGPLNIETKSNALDIIFQTDLTGQKKGWKLRYHGDPMPCPKEDTPNSVWEPAKAKYVFRDVVQITCLDGFEVVEGRVGATSFYSTCQSNGKWSNSKLKCQPVDCGIPESIENGKVEDPESTLFGSVIRYTCEEPYYYMENGGGGEYHCAGNGSWVNEVLGPELPKCVPVCGVPREPFEEKQRIIGGSDADIKNFPWQVFFDNPWAGGALINEYWVLTAAHVVEGNREPTMYVGSTSVQTSRLAKSKMLTPEHVFIHPGWKLLEVPEGRTNFDNDIALVRLKDPVKMGPTVSPICLPGTSSDYNLMDGDLGLISGWGRTEKRDRAVRLKAARLPVAPLRKCKEVKVEKPTADAEAYVFTPNMICAGGEKGMDSCKGDSGGAFAVQDPNDKTKFYAAGLVSWGPQCGTYGLYTRVKNYVDWIMKTMQENSTPRED

SEQ ID NO: 86 - protein, 1744 aa, Homo sapiens
MRLLWGLIWASSFFTLSLQKPRLLLFSPSVVHLGVPLSVGVQLQDVPRGQVVKGSVFLRNPSRNNVPCSPKVDFTLSSERDFALLSLQVPLKDAKSCGLHQLLRGPEVQLVAHSPWLKDSLSRTTNIQGINLLFSSRRGHLFLQTDQPIYNPGQRVRYRVFALDQKMRPSTDTITVMVENSHGLRVRKKEVYMPSSIFQDDFVIPDISEPGTWKISARFSDGLESNSSTQFEVKKYVLPNFEVKITPGKPYILTVPGHLDEMQLDIQARYIYGKPVQGVAYVRFGLLDEDGKKTFFRGLESQTKLVNGQSHISLSKAEFQDALEKLNMGITDLQGLRLYVAAAIIESPGGEMEEAELTSWYFVSSPFSLDLSKTKRHLVPGAPFLLQALVREMSGSPASGIPVKVSATVSSPGSVPEVQDIQQNTDGSGQVSIPIIIPQTISELQLSVSAGSPHPAIARLTVAAPPSGGPGFLSIERPDSRPPRVGDTLNLNLRAVGSGATFSHYYYMILSRGQIVFMNREPKRTLTSVSVFVDHHLAPSFYFVAFYYHGDHPVANSLRVDVQAGACEGKLELSVDGAKQYRNGESVKLHLETDSLALVALGALDTALYAAGSKSHKPLNMGKVFEAMNSYDLGCGPGGGDSALQVFQAAGLAFSDGDQWTLSRKRLSCPKEKTTRKKRNVNFQKAINEKLGQYASPTAKRCCQDGVTRLPMMRSCEQRAARVQQPDCREPFLSCCQFAESLRKKSRDKGQAGLQRALEILQEEDLIDEDDIPVRSFFPENWLWRVETVDRFQILTLWLPDSLTTWEIHGLSLSKTKGLCVATPVQLRVFREFHLHLRLPMSVRRFEQLELRPVLYNYLDKNLTVSVHVSPVEGLCLAGGGGLAQQVLVPAGSARPVAFSVVPTAAAAVSLKVVARGSFEFPVGDAVSKVLQIEKEGAIHREELVYELNPLDHRGRTLEIPGNSDPNMIPDGDFNSYVRVTASDPLDTLGSEGALSPGGVASLLRLPRGCGEQTMIYLAPTLAASRYLDKTEQWSTLPPETKDHAVDLIQKGYMRIQQFRKADGSYAAWLSRDSSTWLTAFVLKVLSLAQEQVGGSPEKLQETSNWLLSQQQADGSFQDPCPVLDRSMQGGLVGNDETVALTAFVTIALHHGLAVFQDEGAEPLKQRVEASISKANSFLGEKASAGLLGAHAAAITAYALTLTKAPVDLLGVAHNNLMAMAQETGDNLYWGSVTGSQSNAVSPTPAPRNPSDPMPQAPALWIETTAYALLHLLLHEGKAEMADQASAWLTRQGSFQGGFRSTQDTVIALDALSAYWIASHTTEERGLNVTLSSTGRNGFKSHALQLNNRQIRGLEEELQFSLGSKINVKVGGNSKGTLKVLRTYNVLDMKNTTCQDLQIEVTVKGHVEYTMEANEDYEDYEYDELPAKDDPDAPLQPVTPLQLFEGRRNRRRREAPKVVEEQESRVHYTVCIWRNGKVGLSGMAIADVTLLSGFHALRADLEKLTSLSDRYVSHFETEGPHVLLYFDSVPTSRECVGFEAVQEVPVGLVQPASATLYDYYNPERRCSVFYGAPSKSRLLATLCSAEVCQCAEGKCPRQRRALERGLQDEDGYRMKFACYYPRVEYGFQVKVLREDSRAAFRLFETKITQVLHFTKDVKAAANQMRNFLVRASCRLRLEPGKEYLIMGLDGATYDLEGHPQYLLDSNSWIEEMPSERLCRSTRQRAACAQLNDFLQEYGTQGCQV

SEQ ID NO: 87 - protein, 843 aa, Homo sapiens
MKVISLFILVGFIGEFQSFSSASSPVNCQWDFYAPWSECNGCTKTQTRRRSVAVYGQYGGQPCVGNAFETQSCEPTRGCPTEEGCGERFRCFSGQCISKSLVCNGDSDCDEDSADEDRCEDSERRPSCDIDKPPPNIELTGNGYNELTGQFRNRVINTKSFGGQCRKVFSGDGKDFYRLSGNVLSYTFQVKINNDFNYEFYNSTWSYVKHTSTEHTSSSRKRSFFRSSSSSSRSYTSHTNEIHKGKSYQLLVVENTVEVAQFINNNPEFLQLAEPFWKELSHLPSLYDYSAYRRLIDQYGTHYLQSGSLGGEYRVLFYVDSEKLKQNDFNSVEEKKCKSSGWHFVVKFSSHGCKELENALKAASGTQNNVLRGEPFIRGGGAGFISGLSYLELDNPAGNKRRYSAWAESVTNLPQVIKQKLTPLYELVKEVPCASVKKLYLKWALEEYLDEFDPCHCRPCQNGGLATVEGTHCLCHCKPYTFGAACEQGVLVGNQAGGVDGGWSCWSSWSPCVQGKKTRSRECNNPPPSGGGRSCVGETTESTQCEDEELEHLRLLEPHCFPLSLVPTEFCPSPPALKDGFVQDEGTMFPVGKNVVYTCNEGYSLIGNPVARCGEDLRWLVGEMHCQKIACVLPVLMDGIQSHPQKPFYTVGEKVTVSCSGGMSLEGPSAFLCGSSLKWSPEMKNARCVQKENPLTQAVPKCQRWEKLQNSRCVCKMPYECGPSLDVCAQDERSKRILPLTVCKMHVLHCQGRNYTLTGRDSCTLPASAEKACGACPLWGKCDAESSKCVCREASECEEEGFSICVEVNGKEQTMSECEAGALRCRGQSISVTSIRPCAAETQ

SEQ ID NO: 88 - protein, 449 aa, Homo sapiens
MMKTLLLFVGLLLTWESGQVLGDQTVSDNELQEMSNQGSKYVNKEIQNAVNGVKQIKTLIEKTNEERKTLLSNLEEAKKKKEDALNETRESETKLKELPGVCNETMMALWEECKPCLKQTCMKFYARVCRSGSGLVGRQLEEFLNQSSPFYFWMNGDRIDSLLENDRQQTHMLDVMQDHFSRASSIIDELFQDRFFTREPQDTYHYLPFSLPHRRPHFFFPKSRIVRSLMPFSPYEPLNFHAMFQPFLEMIHEAQQAMDIHFHSPAFQHPPTEFIREGDDDRTVCREIRHNSTGCLRMKDQCDKCREILSVDCSTNNPSQAKLRRELDESLQVAERLTRKYNELLKSYQWKMLNTSSLLEQLNEQFNWVSRLANLTQGEDQYYLRVTTVASHTSDSDVPSGVTEVVVKLFDSDPITVTVPVEVSRKNPKFMETVAEKALQEYRKKHREE

SEQ ID NO: 89 - protein, 654 aa, Homo sapiens
MKLSLVAAMLLLLSAARAEEEDKKEDVGTVVGIDLGTTYSCVGVFKNGRVEIIANDQGNRITPSYVAFTPEGERLIGDAAKNQLTSNPENTVFDAKRLIGRTWNDPSVQQDIKFLPFKVVEKKTKPYIQVDIGGGQTKTFAPEEISAMVLTKMKETAEAYLGKKVTHAVVTVPAYFNDAQRQATKDAGTIAGLNVMRIINEPTAAAIAYGLDKREGEKNILVFDLGGGTFDVSLLTIDNGVFEVVATNGDTHLGGEDFDQRVMEHFIKLYKKKTGKDVRKDNRAVQKLRREVEKAKRALSSQHQARIEIESFYEGEDFSETLTRAKFEELNMDLFRSTMKPVQKVLEDSDLKKSDIDEIVLVGGSTRIPKIQQLVKEFFNGKEPSRGINPDEAVAYGAAVQAGVLSGDQDTGDLVLLDVCPLTLGIETVGGVMTKLIPRNTVVPTKKSQIFSTASDNQPTVTIKVYEGERPLTKDNHLLGTFDLTGIPPAPRGVPQIEVTFEIDVNGILRVTAEDKGTGNKNKITITNDQNRLTPEEIERMVNDAEKFAEEDKKLKERIDTRNELESYAYSLKNQIGDKEKLGGKLSSEDKETMEKAVEEKIEWLESHQDADIEDFKAKKKELEEIVQPIISKLYGSAGPPPTGEEDTAEKDEL

SEQ ID NO: 90 - protein, 248 aa, Homo sapiens
MSLFPSLPLLLLSMVAASYSETVTCEDAQKTCPAVIACSSPGINGFPGKDGRDGTKGEKGEPGQGLRGLQGPPGKLGPPGNPGPSGSPGPKGQKGDPGKSPDGDSSLAASERKALQTEMARIKKWLTFSLGKQVGNKFFLTNGEIMTFEKVKALCVKFQASVATPRNAAENGAIQNLIKEEAFLGITDEKTEGQFVDLTGNRLTYTNWNEGEPNNAGSDEDCVLLLKNGQWNDVPCSTSHLAVCEFPI

SEQ ID NO: 91 - protein, 2491 aa, Homo sapiens
MGAAAGRSPHLGPAPARRPQRSLLLLQLLLLVAAPGSTQAQAAPFPELCSYTWEAVDTKNNVLYKINICGSVDIVQCGPSSAVCMHDLKTRTYHSVGDSVLRSATRSLLEFNTTVSCDQQGTNHRVQSSIAFLCGKTLGTPEFVTATECVHYFEWRTTAACKKDIFKANKEVPCYVFDEELRKHDLNPLIKLSGAYLVDDSDPDTSLFINVCRDIDTLRDPGSQLRACPPGTAACLVRGHQAFDVGQPRDGLKLVRKDRLVLSYVREEAGKLDFCDGHSPAVTITFVCPSERREGTIPKLTAKSNCRYEIEWITEYACHRDYLESKTCSLSGEQQDVSIDLTPLAQSGGSSYISDGKEYLFYLNVCGETEIQFCNKKQAAVCQVKKSDTSQVKAAGRYHNQTLRYSDGDLTLIYFGGDECSSGFQRMSVINFECNKTAGNDGKGTPVFTGEVDCTYFFTWDTEYACVKEKEDLLCGATDGKKRYDLSALVRHAEPEQNWEAVDGSQTETEKKHFFINICHRVLQEGKARGCPEDAAVCAVDKNGSKNLGKFISSPMKEKGNIQLSYSDGDDCGHGKKIKTNITLVCKPGDLESAPVLRTSGEGGCFYEFEWHTAAACVLSKTEGENCTVFDSQAGFSFDLSPLTKKNGAYKVETKKYDFYINVCGPVSVSPCQPDSGACQVAKSDEKTWNLGLSNAKLSYYDGMIQLNYRGGTPYNNERHTPRATLITFLCDRDAGVGFPEYQEEDNSTYNFRWYTSYACPEEPLECVVTDPSTLEQYDLSSLAKSEGGLGGNWYAMDNSGEHVTWRKYYINVCRPLNPVPGCNRYASACQMKYEKDQGSFTEVVSISNLGMAKTGPVVEDSGSLLLEYVNGSACTTSDGRQTTYTTRIHLVCSRGRLNSHPIFSLNWECVVSFLWNTEAACPIQTTTDTDQACSIRDPNSGFVFNLNPLNSSQGYNVSGIGKIFMFNVCGTMPVCGTILGKPASGCEAETQTEELKNWKPARPVGIEKSLQLSTEGFITLTYKGPLSAKGTADAFIVRFVCNDDVYSGPLKFLHQDIDSGQGIRNTYFEFETALACVPSPVDCQVTDLAGNEYDLTGLSTVRKPWTAVDTSVDGRKRTFYLSVCNPLPYIPGCQGSAVGSCLVSEGNSWNLGVVQMSPQAAANGSLSIMYVNGDKCGNQRFSTRITFECAQISGSPAFQLQDGCEYVFIWRTVEACPVVRVEGDNCEVKDPRHGNLYDLKPLGLNDTIVSAGEYTYYFRVCGKLSSDVCPTSDKSKVVSSCQEKREPQGFHKVAGLLTQKLTYENGLLKMNFTGGDTCHKVYQRSTAIFFYCDRGTQRPVFLKETSDCSYLFEWRTQYACPPFDLTECSFKDGAGNSFDLSSLSRYSDNWEAITGTGDPEHYLINVCKSLAPQAGTEPCPPEAAACLLGGSKPVNLGRVRDGPQWRDGIIVLKYVDGDLCPDGIRKKSTTIRFTCSESQVNSRPMFISAVEDCEYTFAWPTATACPMKSNEHDDCQVTNPSTGHLFDLSSLSGRAGFTAAYSEKGLVYMSICGENENCPPGVGACFGQTRISVGKANKRLRYVDQVLQLVYKDGSPCPSKSGLSYKSVISFVCRPEARPTNRPMLISLDKQTCTLFFSWHTPLACEQATECSVRNGSSIVDLSPLIHRTGGYEAYDESEDDASDTNPDFYINICQPLNPMHGVPCPAGAAVCKVPIDGPPIDIGRVAGPPILNPIANEIYLNFESSTPCLADKHFNYTSLIAFHCKRGVSMGTPKLLRTSECDFVFEWETPVVCPDEVRMDGCTLTDEQLLYSFNLSSLSTSTFKVTRDSRTYSVGVCTFAVGPEQGGCKDGGVCLLSGTKGASFGRLQSMKLDYRHQDEAVVLSYVNGDRCPPETDDGVPCVFPFIFNGKSYEECIIESRAKLWCSTTADYDRDHEWGFCRHSNSYRTSSIIFKCDEDEDIGRPQVFSEVRGCDVTFEWKTKVVCPPKKLECKFVQKHKTYDLRLLSSLTGSWSLVHNGVSYYINLCQKIYKGPLGCSERASICRRTTTGDVQVLGLVHTQKLGVIGDKVVVTYSKGYPCGGNKTASSVIELTCTKTVGRPAFKRFDIDSCTYYFSWDSRAACAVKPQEVQMVNGTITNPINGKSFSLGDIYFKLFRASGDMRTNGDNYLYEIQLSSITSSRNPACSGANICQVKPNDQHFSRKVGTSDKTKYYLQDGDLDVVFASSSKCGKDKTKSVSSTIFFHCDPLVEDGIPEFSHETADCQYLFSWYTSAVCPLGVGFDSENPGDDGQMHKGLSERSQAVGAVLSLLLVALTCCLLALLLYKKERRETVISKLTTCCRRSSNVSYKYSKVNKEEETDENETEWLMEEIQLPPPRQGKEGQENGHITTKSVKALSSLHGDDQDSEDEVLTIPEVKVHSGRGAGAESSHPVRNAQSNALQEREDDRVGLVRGEKARKGKSSSAQQKTVSSTKLVSFHDDSDEDLLHI

SEQ ID NO: 92 - protein, 3177 aa, Homo sapiens
MRKHRHLPLVAVFCLFLSGFPTTHAQQQQADVKNGAAADIIFLVDSSWTIGEEHFQLVREFLYDVVKSLAVGENDFHFALVQFNGNPHTEFLLNTYRTKQEVLSHISNMSYIGGTNQTGKGLEYIMQSHLTKAAGSRAGDGVPQVIVVLTDGHSKDGLALPSAELKSADVNVFAIGVEDADEGALKEIASEPLNMHMFNLENFTSLHDIVGNLVSCVHSSVSPERAGDTETLKDITAQDSADIIFLIDGSNNTGSVNFAVILDFLVNLLEKLPIGTQQIRVGVVQFSDEPRTMFSLDTYSTKAQVLGAVKALGFAGGELANIGLALDFVVENHFTRAGGSRVEEGVPQVLVLISAGPSSDEIRYGVVALKQASVFSFGLGAQAASRAELQHIATDDNLVFTVPEFRSFGDLQEKLLPYIVGVAQRHIVLKPPTIVTQVIEVNKRDIVFLVDGSSALGLANFNAIRDFIAKVIQRLEIGQDLIQVAVAQYADTVRPEFYFNTHPTKREVITAVRKMKPLDGSALYTGSALDFVRNNLFTSSAGYRAAEGIPKLLVLITGGKSLDEISQPAQELKRSSIMAFAIGNKGADQAELEEIAFDSSLVFIPAEFRAAPLQGMLPGLLAPLRTLSGTPEVHSNKRDIIFLLDGSANVGKTNFPYVRDFVMNLVNSLDIGNDNIRVGLVQFSDTPVTEFSLNTYQTKSDILGHLRQLQLQGGSGLNTGSALSYVYANHFTEAGGSRIREHVPQLLLLLTAGQSEDSYLQAANALTRAGILTFCVGASQANKAELEQIAFNPSLVYLMDDFSSLPALPQQLIQPLTTYVSGGVEEVPLAQPESKRDILFLFDGSANLVGQFPVVRDFLYKIIDELNVKPEGTRIAVAQYSDDVKVESRFDEHQSKPEILNLVKRMKIKTGKALNLGYALDYAQRYIFVKSAGSRIEDGVLQFLVLLVAGRSSDRVDGPASNLKQSGVVPFIFQAKNADPAELEQIVLSPAFILAAESLPKIGDLHPQIVNLLKSVHNGAPAPVSGEKDVVFLLDGSEGVRSGFPLLKEFVQRVVESLDVGQDRVRVAVVQYSDRTRPEFYLNSYMNKQDVVNAVRQLTLLGGPTPNTGAALEFVLRNILVSSAGSRITEGVPQLLIVLTADRSGDDVRNPSVVVKRGGAVPIGIGIGNADITEMQTISFIPDFAVAIPTFRQLGTVQQVISERVTQLTREELSRLQPVLQPLPSPGVGGKRDVVFLIDGSQSAGPEFQYVRTLIERLVDYLDVGFDTTRVAVIQFSDDPKVEFLLNAHSSKDEVQNAVQRLRPKGGRQINVGNALEYVSRNIFKRPLGSRIEEGVPQFLVLISSGKSDDEVDDPAVELKQFGVAPFTIARNADQEELVKISLSPEYVFSVSTFRELPSLEQKLLTPITTLTSEQIQKLLASTRYPPPAVESDAADIVFLIDSSEGVRPDGFAHIRDFVSRIVRRLNIGPSKVRVGVVQFSNDVFPEFYLKTYRSQAPVLDAIRRLRLRGGSPLNTGKALEFVARNLFVKSAGSRIEDGVPQHLVLVLGGKSQDDVSRFAQVIRSSGIVSLGVGDRNIDRTELQTITNDPRLVFTVREFRELPNIEERIMNSFGPSAATPAPPGVDTPPPSRPEKKKADIVFLLDGSINFRRDSFQEVLRFVSEIVDTVYEDGDSIQVGLVQYNSDPTDEFFLKDFSTKRQIIDAINKVVYKGGRHANTKVGLEHLRVNHFVPEAGSRLDQRVPQIAFVITGGKSVEDAQDVSLALTQRGVKVFAVGVRNIDSEEVGKIASNSATAFRVGNVQELSELSEQVLETLHDAMHETLCPGVTDAAKACNLDVILGFDGSRDQNVFVAQKGFESKVDAILNRISQMHRVSCSGGRSPTVRVSVVANTPSGPVEAFDFDEYQPEMLEKFRNMRSQHPYVLTEDTLKVYLNKFRQSSPDSVKVVIHFTDGADGDLADLHRASENLRQEGVRALILVGLERVVNLERLMHLEFGRGFMYDRPLRLNLLDLDYELAEQLDNIAEKACCGVPCKCSGQRGDRGPIGSIGPKGIPGEDGYRGYPGDEGGPGERGPPGVNGTQGFQGCPGQRGVKGSRGFPGEKGEVGEIGLDGLDGEDGDKGLPGSSGEKGNPGRRGDKGPRGEKGERGDVGIRGDPGNPGQDSQERGPKGETGDLGPMGVPGRDGVPGGPGETGKNGGFGRRGPPGAKGNKGGPGQPGFEGEQGTRGAQGPAGPAGPPGLIGEQGISGPRGSGGAAGAPGERGRTGPLGRKGEPGEPGPKGGIGNRGPRGETGDDGRDGVGSEGRRGKKGERGFPGYPGPKGNPGEPGLNGTTGPKGIRGRRGNSGPPGIVGQKGDPGYPGPAGPKGNRGDSIDQCALIQSIKDKCPCCYGPLECPVFPTELAFALDTSEGVNQDTFGRMRDVVLSIVNDLTIAESNCPRGARVAVVTYNNEVTTEIRFADSKRKSVLLDKIKNLQVALTSKQQSLETAMSFVARNTFKRVRNGFLMRKVAVFFSNTPTRASPQLREAVLKLSDAGITPLFLTRQEDRQLINALQINNTAVGHALVLPAGRDLTDFLENVLTCHVCLDICNIDPSCGFGSWRPSFRDRRAAGSDVDIDMAFILDSAETTTLFQFNEMKKYIAYLVRQLDMSPDPKASQHFARVAVVQHAPSESVDNASMPPVKVEFSLTDYGSKEKLVDFLSRGMTQLQGTRALGSAIEYTIENVFESAPNPRDLKIVVLMLTGEVPEQQLEEAQRVILQAKCKGYFFVVLGIGRKVNIKEVYTFASEPNDVFFKLVDKSTELNEEPLMRFGRLLPSFVSSENAFYLSPDIRKQCDWFQGDQPTKNLVKFGHKQVNVPNNVTSSPTSNPVTTTKPVTTTKPVTTTTKPVTTTTKPVTIINQPSVKPAAAKPAPAKPVAAKPVATKMATVRPPVAVKPATAAKPVAAKPAAVRPPAAAAAKPVATKPEVPRPQAAKPAATKPATTKPMVKMSREVQVFEITENSAKLHWERAEPPGPYFYDLTVTSAHDQSLVLKQNLTVTDRVIGGLLAGQTYHVAVVCYLRSQVRATYHGSFSTKKSQPPPPQPARSASSSTINLMVSTEPLALTETDICKLPKDEGTCRDFILKWYYDPNTKSCARFWYGGCGGNENKFGSQKECEKVCAPVLAKPGVISVMGT

SEQ ID NO: 93 - protein, 2224 aa, Homo sapiens
MFPGCPRLWVLVVLGTSWVGWGSQGTEAAQLRQFYVAAQGISWSYRPEPTNSSLNLSVTSFKKIVYREYEPYFKKEKPQSTISGLLGPTLYAEVGDIIKVHFKNKADKPLSIHPQGIRYSKLSEGASYLDHTFPAEKMDDAVAPGREYTYEWSISEDSGPTHDDPPCLTHIYYSHENLIEDFNSGLIGPLLICKKGTLTEGGTQKTFDKQIVLLFAVFDESKSWSQSSSLMYTVNGYVNGTMPDITVCAHDHISWHLLGMSSGPELFSIHFNGQVLEQNHHKVSAITLVSATSTTANMTVGPEGKWIISSLTPKHLQAGMQAYIDIKNCPKKTRNLKKITREQRRHMKRWEYFIAAEEVIWDYAPVIPANMDKKYRSQHLDNFSNQIGKHYKKVMYTQYEDESFTKHTVNPNMKEDGILGPIIRAQVRDTLKIVFKNMASRPYSIYPHGVTFSPYEDEVNSSFTSGRNNTMIRAVQPGETYTYKWNILEFDEPTENDAQCLTRPYYSDVDIMRDIASGLIGLLLICKSRSLDRRGIQRAADIEQQAVFAVFDENKSWYLEDNINKFCENPDEVKRDDPKFYESNIMSTINGYVPESITTLGFCFDDTVQWHFCSVGTQNEILTIHFTGHSFIYGKRHEDTLTLFPMRGESVTVTMDNVGTWMLTSMNSSPRSKKLRLKFRDVKCIPDDDEDSYEIFEPPESTVMATRKMHDRLEPEDEESDADYDYQNRLAAALGIRSFRNSSLNQEEEEFNLTALALENGTEFVSSNTDIIVGSNYSSPSNISKFTVNNLAEPQKAPSHQQATTAGSPLRHLIGKNSVLNSSTAEHSSPYSEDPIEDPLQPDVTGIRLLSLGAGEFKSQEHAKHKGPKVERDQAAKHRFSWMKLLAHKVGRHLSQDTGSPSGMRPWEDLPSQDTGSPSRMRPWKDPPSDLLLLKQSNSSKILVGRWHLASEKGSYEIIQDTDEDTAVNNWLISPQNASRAWGESTPLANKPGKQSGHPKFPRVRHKSLQVRQDGGKSRLKKSQFLIKTRKKKKEKHTHHAPLSPRTFHPLRSEAYNTFSERRLKHSLVLHKSNETSLPTDLNQTLPSMDFGWIASLPDHNQNSSNDTGQASCPPGLYQTVPPEEHYQTFPIQDPDQMHSTSDPSHRSSSPELSEMLEYDRSHKSFPTDISQMSPSSEHEVWQTVISPDLSQVTLSPELSQTNLSPDLSHTTLSPELIQRNLSPALGQMPISPDLSHTTLSPDLSHTTLSLDLSQTNLSPELSQTNLSPALGQMPLSPDLSHTTLSLDFSQTNLSPELSHMTLSPELSQTNLSPALGQMPISPDLSHTTLSLDFSQTNLSPELSQTNLSPALGQMPLSPDPSHTTLSLDLSQTNLSPELSQTNLSPDLSEMPLFADLSQIPLTPDLDQMTLSPDLGETDLSPNFGQMSLSPDLSQVTLSPDISDTTLLPDLSQISPPPDLDQIFYPSESSQSLLLQEFNESFPYPDLGQMPSPSSPTLNDTFLSKEFNPLVIVGLSKDGTDYIEIIPKEEVQSSEDDYAEIDYVPYDDPYKTDVRTNINSSRDPDNIAAWYLRSNNGNRRNYYIAAEEISWDYSEFVQRETDIEDSDDIPEDTTYKKVVFRKYLDSTFTKRDPRGEYEEHLGILGPIIRAEVDDVIQVRFKNLASRPYSLHAHGLSYEKSSEGKTYEDDSPEWFKEDNAVQPNSSYTYVWHATERSGPESPGSACRAWAYYSAVNPEKDIHSGLIGPLLICQKGILHKDSNMPMDMREFVLLFMTFDEKKSWYYEKKSRSSWRLTSSEMKKSHEFHAINGMIYSLPGLKMYEQEWVRLHLLNIGGSQDIHVVHFHGQTLLENGNKQHQLGVWPLLPGSFKTLEMKASKPGWWLLNTEVGENQRAGMQTPFLIMDRDCRMPMGLSTGIISDSQIKASEFLGYWEPRLARLNNGGSYNAWSVEKLAAEFASKPWIQVDMQKEVIITGIQTQGAKHYLKSCYTTEFYVAYSSNQINWQIFKGNSTRNVMYFNGNSDASTIKENQFDPPIVARYIRISPTRAYNRPTLRLELQGCEVNGCSTPLGMENGKIENKQITASSFKKSWWGDYWEPFRARLNAQGRVNAWQAKANNNKQWLEIDLLKIKKITAIITQGCKSLSSEMYVKSYTIHYSEQGVEWKPYRLKSSMVDKIFEGNTNTKGHVKNFFNPPIISRFIRVIPKTWNQSIALRLELFGCDIY

SEQ ID NO: 94 - protein, 584 aa, Homo sapiens
MSVRYSSSKHYSSSRSGGGGGGGGCGGGGGVSSLRISSSKGSLGGGFSSGGFSGGSFSRGSSGGGCFGGSSGGYGGLGGFGGGSFRGSYGSSSFGGSYGGIFGGGSFGGGSFGGGSFGGGGFGGGGFGGGFGGGFGGDGGLLSGNEKVTMQNLNDRLASYLDKVRALEESNYELEGKIKEWYEKHGNSHQGEPRDYSKYYKTIDDLKNQILNLTTDNANILLQIDNARLAADDFRLKYENEVALRQSVEADINGLRRVLDELTLTKADLEMQIESLTEELAYLKKNHEEEMKDLRNVSTGDVNVEMNAAPGVDLTQLLNNMRSQYEQLAEQNRKDAEAWFNEKSKELTTEIDNNIEQISSYKSEITELRRNVQALEIELQSQLALKQSLEASLAETEGRYCVQLSQIQAQISALEEQLQQIRAETECQNTEYQQLLDIKIRLENEIQTYRSLLEGEGSSGGGGRGGGSFGGGYGGGSSGGGSSGGGHGGGHGGSSGGGYGGGSSGGGSSGGGYGGGSSSGGHGGSSSGGYGGGSSGGGGGGYGGGSSGGGSSSGGGYGGGSSSGGHKSSSSGSVGESSSKGPRY

SEQ ID NO: 95 - protein, 934 aa, Homo sapiens
MARRSVLYFILLNALINKGQACFCDHYAWTQWTSCSKTCNSGTQSRHRQIVVDKYYQENFCEQICSKQETRECNWQRCPINCLLGDFGPWSDCDPCIEKQSKVRSVLRPSQFGGQPCTAPLVAFQPCIPSKLCKIEEADCKNKFRCDSGRCIARKLECNGENDCGDNSDERDCGRTKAVCTRKYNPIPSVQLMGNGFHFLAGEPRGEVLDNSFTGGICKTVKSSRTSNPYRVPANLENVGFEVQTAEDDLKTDFYKDLTSLGHNENQQGSFSSQGGSSFSVPIFYSSKRSENINHNSAFKQAIQASHKKDSSFIRIHKVMKVLNFTTKAKDLHLSDVFLKALNHLPLEYNSALYSRIFDDFGTHYFTSGSLGGVYDLLYQFSSEELKNSGLTEEEAKHCVRIETKKRVLFAKKTKVEHRCTTNKLSEKHEGSFIQGAEKSISLIRGGRSEYGAALAWEKGSSGLEEKTFSEWLESVKENPAVIDFELAPIVDLVRNIPCAVTKRNNLRKALQEYAAKFDPCQCAPCPNNGRPTLSGTECLCVCQSGTYGENCEKQSPDYKSNAVDGQWGCWSSWSTCDATYKRSRTRECNNPAPQRGGKRCEGEKRQEEDCTFSIMENNGQPCINDDEEMKEVDLPEIEADSGCPQPVPPENGFIRNEKQLYLVGEDVEISCLTGFETVGYQYFRCLPDGTWRQGDVECQRTECIKPVVQEVLTITPFQRLYRIGESIELTCPKGFVVAGPSRYTCQGNSWTPPISNSLTCEKDTLTKLKGHCQLGQKQSGSECICMSPEEDCSHHSEDLCVFDTDSNDYFTSPACKFLAEKCLNNQQLHFLHIGSCQDGRQLEWGLERTRLSSNSTKKESCGYDTCYDWEKCSASTSKCVCLLPPQCFKGGNQLYCVKMGSSTSEKTLNICEVGTIRCANRKMEILHPGKCLA

SEQ ID NO: 96 - protein, 627 aa, Homo sapiens
MARGSVSDEEMMELREAFAKVDTDGNGYISFNELNDLFKAACLPLPGYRVREITENLMATGDLDQDGRISFDEFIKIFHGLKSTDVAKTFRKAINKKEGICAIGGTSEQSSVGTQHSYSEEEKYAFVNWINKALENDPDCRHVIPMNPNTNDLFNAVGDGIVLCKMINLSVPDTIDERTINKKKLTPFTIQENLNLALNSASAIGCHVVNIGAEDLKEGKPYLVLGLLWQVIKIGLFADIELSRNEALIALLREGESLEDLMKLSPEELLLRWANYHLENAGCNKIGNFSTDIKDSKAYYHLLEQVAPKGDEEGVPAVVIDMSGLREKDDIQRAECMLQQAERLGCRQFVTATDVVRGNPKLNLAFIANLFNRYPALHKPENQDIDWGALEGETREERTFRNWMNSLGVNPRVNHLYSDLSDALVIFQLYEKIKVPVDWNRVNKPPYPKLGGNMKKLENCNYAVELGKNQAKFSLVGIGGQDLNEGNRTLTLALIWQLMRRYTLNILEEIGGGQKVNDDIIVNWVNETLREAKKSSSISSFKDPKISTSLPVLDLIDAIQPGSINYDLLKTENLNDDEKLNNAKYAISMARKIGARVYALPEDLVEVNPKMVMTVFACLMGKGMKRV

SEQ ID NO: 97 - protein, 372 aa, Homo sapiens [sequence omitted]

SEQ ID NO: 98 - protein, 531 aa, Homo sapiens
MSKPHSEAGTAFIQTQQLHAAMADTFLEHMCRLDIDSPPITARNTGIICTIGPASRSVETLKEMIKSGMNVARLNFSHGTHEYHAETIKNVRTATESFASDPILYRPVAVALDTKGPEIRTGLIKGSGTAEVELKKGATLKITLDNAYMEKCDENILWLDYKNICKVVEVGSKIYVDDGLISLQVKQKGADFLVTEVENGGSLGSKKGVNLPGAAVDLPAVSEKDIQDLKFGVEQDVDMVFASFIRKASDVHEVRKVLGEKGKNIKIISKIENHEGVRRFDEILEASDGIMVARGDLGIEIPAEKVFLAQKMMIGRCNRAGKPVICATQMLESMIKKPRPTRAEGSDVANAVLDGADCIMLSGETAKGDYPLEAVRMQHLIAREAEAAIYHLQLFEELRRLAPITSDPTEATAVGAVEASFKCCSGAIIVLTKSGRSAHQVARYRPRAPIIAVTRNPQTARQAHLYRGIFPVLCKDPVQEAWAEDVDLRVNFAMNVGKARGFFKKGDVVIVLTGWRPGSGFTNTMRVVPVP

SEQ ID NO: 99 - protein, 707 aa, Homo sapiens
MSLWQPLVLVLLVLGCCFAAPRQRQSTLVLFPGDLRTNLTDRQLAEEYLYRYGYTRVAEMRGESKSLGPALLLLQKQLSLPETGELDSATLKAMRTPRCGVPDLGRFQTFEGDLKWHHHNITYWIQNYSEDLPRAVIDDAFARAFALWSAVTPLTFTRVYSRDADIVIQFGVAEHGDGYPFDGKDGLLAHAFPPGPGIQGDAHFDDDELWSLGKGVVVPTRFGNADGAACHFPFIFEGRSYSACTTDGRSDGLPWCSTTANYDTDDRFGFCPSERLYTQDGNADGKPCQFPFIFQGQSYSACTTDGRSDGYRWCATTANYDRDKLFGFCPTRADSTVMGGNSAGELCVFPFTFLGKEYSTCTSEGRGDGRLWCATTSNFDSDKKWGFCPDQGYSLFLVAAHEFGHALGLDHSSVPEALMYPMYRFTEGPPLHKDDVNGIRHLYGPRPEPEPRPPTTTTPQPTAPPTVCPTGPPTVHPSERPTAGPTGPPSAGPTGPPTAGPSTATTVPLSPVDDACNVNIFDAIAEIGNQLYLFKDGKYWRFSEGRGSRPQGPFLIADKWPALPRKLDSVFEERLSKKLFFFSGRQVWVYTGASVLGPRRLDKLGLGADVAQVTGALRSGRGKMLLFSGRRLWRFDVKAQMVDPRSASEVDRMFPGVPLDTHDVFQYREKAYFCQDRFYWRVSSRSELNQVDQVGYVTYDILQCPED

SEQ ID NO: 100 - protein, 745 aa, Homo sapiens
MEVMNLMEQPIKVTEWQQTYTYDSGIHSGANTCVPSVSSKGIMEEDEACGRQYTLKKTTTYTQGVPPSQGDLEYQMSTTARAKRVREAMCPGVSGEDSSLLLATQVEGQATNLQRLAEPSQLLKSAIVHLINYQDDAELATRALPELTKLLNDEDPVVVTKAAMIVNQLSKKEASRRALMGSPQLVAAVVRTMQNTSDLDTARCTTSILHNLSHHREGLLAIFKSGGIPALVRMLSSPVESVLFYAITTLHNLLLYQEGAKMAVRLADGLQKMVPLLNKNNPKFLAITTDCLQLLAYGNQESKLIILANGGPQALVQIMRNYSYEKLLWTTSRVLKVLSVCPSNKPAIVEAGGMQALGKHLTSNSPRLVQNCLWTLRNLSDVATKQEGLESVLKILVNQLSVDDVNVLTCATGTLSNLTCNNSKNKTLVTQNSGVEALIHAILRAGDKDDITEPAVCALRHLTSRHPEAEMAQNSVRLNYGIPAIVKLLNQPNQWPLVKATIGLIRNLALCPANHAPLQEAAVIPRLVQLLVKAHQDAQRHVAAGTQQPYTDGVRMEEIVEGCTGALHILARDPMNRMEIFRLNTIPLFVQLLYSSVENIQRVAAGVLCELAQDKEAADAIDAEGASAPLMELLHSRNEGTATYAAAVLFRISEDKNPDYRKRVSVELTNSLFKHDPAAWEAAQSMIPINEPYGDDMDATYRPMYSSDVPLDPLEMHMDMDGDYPIDTYSDGLRPPYPTADHMLA

SEQ ID NO: 101 - protein, 458 aa, Homo sapiens
MSDLLSVFLHLLLLFKLVAPVTFRHHRYDDLVRTLYKVQNECPGITRVYSIGRSVEGRHLYVLEFSDHPGIHEPLEPEVKYVGNMHGNEALGRELMLQLSEFLCEEFRNRNQRIVQLIQDTRIHILPSMNPDGYEVAAAQGPNKPGYLVGRNNANGVDLNRNFPDLNTYIYYNEKYGGPNHHLPLPDNWKSQVEPETRAVIRWMHSFNFVLSANLHGGAVVANYPYDKSFEHRVRGVRRTASTPTPDDKLFQKLAKVYSYAHGWMFQGWNCGDYFPDGITNGASWYSLSKGMQDFNYLHTNCFEITLELSCDKFPPEEELQREWLGNREALIQFLEQVHQGIKGMVLDENYNNLANAVISVSGINHDVTSGDHGDYFRLLLPGIYTVSATAPGYDPETVTVTVGPAEPTLVNFHLKRSIPQVSPVRRAPSRRHGVRAKVQPQARKKEMEMRQLQRGPA

SEQ ID NO: 102 - protein, 257 aa, Homo sapiens
MAQRMTTQLLLLLVWVAVVGEAQTRIAWARTELLNVCMNAKHHKEKPGPEDKLHEQCRPWRKNACCSTNTSQEAHKDVSYLYRFNWNHCGEMAPACKRHFIQDTCLYECSPNLGPWIQQVDQSWRKERVLNVPLCKEDCEQWWEDCRTSYTCKSNWHKGWNWTSGFNKCAVGAACQPFHFYFPTPTVLCNEIWTHSYKVSNYSRGSGRCIQMWFDPAQGNPNEEVARFYAAAMSGAGPWAAWPFLLSLALMLLWLLS

SEQ ID NO: 103 - protein, 2871 aa, Homo sapiens
MSCNGGSHPRINTLGRMIRAESGPDLRYEVTSGGGGTSRMYYSRRGVITDQNSDGYCQTGTMSRHQNQNTIQELLQNCSDCLMRAELIVQPELKYGDGIQLTRSRELDECFAQANDQMEILDSLIREMRQMGQPCDAYQKRLLQLQEQMRALYKAISVPRVRRASSKGGGGYTCQSGSGWDEFTKHVTSECLGWMRQQRAEMDMVAWGVDLASVEQHINSHRGIHNSIGDYRWQLDKIKADLREKSAIYQLEEEYENLLKASFERMDHLRQLQNIIQATSREIMWINDCEEEELLYDWSDKNTNIAQKQEAFSIRMSQLEVKEKELNKLKQESDQLVLNQHPASDKIEAYMDTLQTQWSWILQITKCIDVHLKENAAYFQFFEEAQSTEAYLKGLQDSIRKKYPCDKNMPLQHLLEQIKELEKEREKILEYKRQVQNLVNKSKKIVQLKPRNPDYRSNKPIILRALCDYKQDQKIVHKGDECILKDNNERSKWYVTGPGGVDMLVPSVGLIIPPPNPLAVDLSCKIEQYYEAILALWNQLYINMKSLVSWHYCMIDIEKIRAMTIAKLKTMRQEDYMKTIADLELHYQEFIRNSQGSEMFGDDDKRKIQSQFTDAQKHYQTLVIQLPGYPQHQTVTTTEITHHGTCQDVNHNKVIETNRENDKQETWMLMELQKIRRQIEHCEGRMTLKNLPLADQGSSHHITVKINELKSVQNDSQAIAEVLNQLKDMLANFRGSEKYCYLQNEVFGLFQKLENINGVTDGYLNSLCTVRALLQAILQTEDMLKVYEARLTEEETVCLDLDKVEAYRCGLKKIKNDLNLKKSLLATMKTELQKAQQIHSQTSQQYPLYDLDLGKFGEKVTQLTDRWQRIDKQIDFRLWDLEKQIKQLRNYRDNYQAFCKWLYDAKRRQDSLESMKFGDSNTVMRFLNEQKNLHSEISGKRDKSEEVQKIAELCANSIKDYELQLASYTSGLETLLNIPIKRTMIQSPSGVILQEAADVHARYIELLTRSGDYYRFLSEMLKSLEDLKLKNTKIEVLEEELRLARDANSENCNKNKFLDQNLQKYQAECSQFKAKLASLEELKRQAELDGKSAKQNLDKCYGQIKELNEKITRLTYEIEDEKRRRKSVEDRFDQQKNDYDQLQKARQCEKENLGWQKLESEKAIKEKEYEIERLRVLLQEEGTRKREYENELAKVRNHYNEEMSNLRNKYETEINITKTTIKEISMQKEDDSKNLRNQLDRLSRENRDLKDEIVRLNDSILQATEQRRRAEENALQQKACGSEIMQKKQHLEIELKQVMQQRSEDNARHKQSLEEAAKTIQDKNKEIERLKAEFQEEAKRRWEYENELSKVRNNYDEEIISLKNQFETEINITKTTIHQLTMQKEEDTSGYRAQIDNLTRENRSLSEEIKRLKNTLTQTTENLRRVEEDIQQQKATGSEVSQRKQQLEVELRQVTQMRTEESVRYKQSLDDAAKTIQDKNKEIERLKQLIDKETNDRKCLEDENARLQRVQYDLQKANSSATETINKLKVQEQELTRLRIDYERVSQERTVKDQDITRFQNSLKELQLQKQKVEEELNRLKRTASEDSCKRKKLEEELEGMRRSLKEQAIKITNLTQQLEQASIVKKRSEDDLRQQRDVLDGHLREKQRTQEELRRLSSEVEALRRQLLQEQESVKQAHLRNEHFQKAIEDKSRSLNESKIEIERLQSLTENLTKEHLMLEEELRNLRLEYDDLRRGRSEADSDKNATILELRSQLQISNNRTLELQGLINDLQRERENLRQEIEKFQKQALEASNRIQESKNQCTQVVQERESLLVKIKVLEQDKARLQRLEDELNRAKSTLEAETRVKQRLECEKQQIQNDLNQWKTQYSRKEEAIRKIESEREKSEREKNSLRSEIERLQAEIKRIEERCRRKLEDSTRETQSQLETERSRYQREIDKLRQRPYGSHRETQTECEWTVDTSKLVFDGLRKKVTAMQLYECQLIDKTTLDKLLKGKKSVEEVASEIQPFLRGAGSIAGASASPKEKYSLVEAKRKKLISPESTVMLLEAQAATGGIIDPHRNEKLTVDSAIARDLIDFDDRQQIYAAEKAITGFDDPFSGKTVSVSEAIKKNLIDRETGMRLLEAQIASGGVVDPVNSVFLPKDVALARGLIDRDLYRSLNDPRDSQKNFVDPVTKKKVSYVQLKERCRIEPHTGLLLLSVQKRSMSFQGIRQPVTVTELVDSGILRPSTVNELESGQISYDEVGERIKDFLQGSSCIAGIYNETTKQKLGIYEAMKIGLVRPGTALELLEAQAATGFIVDPVSNLRLPVEEAYKRGLVGIEFKEKLLSAERAVTGYNDPETGNIISLFQAMNKELIEKGHGIRLLEAQIATGGIIDPKESHRLPVDIAYKRGYFNEELSEILSDPSDDTKGFFDPNTEENLTYLQLKERCIKDEETGLCLLPLKEKKKQVQTSQKNTLRKRRVVIVDPETNKEMSVQEAYKKGLIDYETFKELCEQECEWEEITITGSDGSTRVVLVDRKTGSQYDIQDAIDKGLVDRKFFDQYRSGSLSLTQFADMISLKNGVGTSSSMGSGVSDDVFSSSRHESVSKISTISSVRNLTIRSSSFSDTLEESSPIAAIFDTENLEKISITEGIERGIVDSITGQRLLEAQACTGGIIHPTTGQKLSLQDAVSQGVIDQDMATRLKPAQKAFIGFEGVKGKKKMSAAEAVKEKWLPYEAGQRFLEFQYLTGGLVDPEVHGRISTEEAIRKGFIDGRAAQRLQDTSSYAKILTCPKTKLKISYKDAINRSMVEDITGLRLLEAASVSSKGLPSPYNMSSAPGSRSGSRSGSRSGSRSGSRSGSRRGSFDATGNSSYSYSYSFSSSSIGH

SEQ ID NO: 104 - protein, 220 aa, Homo sapiens
MGAAARTLRLALGLLLLATLLRPADACSCSPVHPQQAFCNADVVIRAKAVSEKEVDSGNDIYGNPIKRIQYEIKQIKMFKGPEKDIEFIYTAPSSAVCGVSLDVGGKKEYLIAGKAEGDGKMHITLCDFIVPWDTLSTTQKKSLNHRYQMGCECKITRCPMIPCYISSPDECLWMDWVTEKNINGHQAKFFACIKRSDGSCAWYRGAAPPKQEFLDIEDP

SEQ ID NO: 105 - protein, 291 aa, Homo sapiens
MQRARPTLWAAALTLLVLLRGPPVARAGASSAGLGPVVRCEPCDARALAQCAPPPAVCAELVREPGCGCCLTCALSEGQPCGIYTERCGSGLRCQPSPDEARPLQALLDGRGLCVNASAVSRLRAYLLPAPPAPGNASESEEDRSAGSVESPSVSSTHRVSDPKFHPLHSKIIIIKKGHAKDSQRYKVDYESQSTDTQNFSSESKRETEYGPCRREMEDTLNHLKFLNVLSPRGVHIPNCDKKGFYKKKQCRPSKGRKRGFCWCVDKYGQPLPGYTTKGKEDVHCYSMQSK

SEQ ID NO: 106 - protein, 325 aa, Homo sapiens
MLPRVGCPALPLPPPPLLPLLLLLLGASGGGGGARAEVLFRCPPCTPERLAACGPPPVAPPAAVAAVAGGARMPCAELVREPGCGCCSVCARLEGEACGVYTPRCGQGLRCYPHPGSELPLQALVMGEGTCEKRRDAEYGASPEQVADNGDDHSEGGLVENHVDSTMNMLGGGGSAGRKPLKSGMKELAVFREKVTEQHRQMGKGGKHHLGLEEPKKLRPPPARTPCQQELDQVLERISTMRLPDERGPLEHLYSLHIPNCDKHGLYNLKQCKMSLNGQRGECWCVNPNTGKLIQGAPTIRGDPECHLFYNEQQEARGVHTQRMQ

SEQ ID NO: 107 - protein, 481 aa, Homo sapiens
MGALARALPSILLALLLTSTPEALGANPGLVARITDKGLQYAAQEGLLALQSELLRITLPDFTGDLRIPHVGRGRYEFHSLNIHSCELLHSALRPVPGQGLSLSISDSSIRVQGRWKVRKSFFKLQGSFDVSVKGISISVNLLLGSESSGRPTVTASSCSSDIADVEVDMSGDLGWLLNLFHNQIESKFQKVLESRICEMIQKSVSSDLQPYLQTLPVTTEIDSFADIDYSLVEAPRATAQMLEVMFKGEIFHRNHRSPVTLLAAVMSLPEEHNKMVYFAISDYVFNTASLVYHEEGYLNFSITDDMIPPDSNIRLTTKSFRPFVPRLARLYPNMNLELQGSVPSAPLLNFSPGNLSVDPYMEIDAFVLLPSSSKEPVFRLSVATNVSATLTFNTSKITGFLKPGKVKVELKESKVGLFNAELLEALLNYYILNTFYPKFNDKLAEGFPLPLLKRVQLYDLGLQIHKDFLFLGANVQYMRV

SEQ ID NO: 108 - protein, 456 aa, Homo sapiens
MTTTFLQTSSSTFGGGSTRGGSLLAGGGGFGGGSLSGGGGSRSISASSARFVSSGSGGGYGGGMRVCGFGGGAGSVFGGGFGGGVGGGFGGGFGGGDGGLLSGNEKITMQNLNDRLASYLDKVRALEEANADLEVKIHDWYQKQTPTSPECDYSQYFKTIEELRDKIMATTIDNSRVILEIDNARLAADDFRLKYENELALRQGVEADINGLRRVLDELTLARTDLEMQIEGLNEELAYLKKNHEEEMKEFSSQLAGQVNVEMDAAPGVDLTRVLAEMREQYEAMAEKNRRDVEAWFFSKTEELNKEVASNTEMIQTSKTEITDLRRTMQELEIELQSQLSMKAGLENSLAETECRYATQLQQIQGLIGGLEAQLSELRCEMEAQNQEYKMLLDIKTRLEQEIATYRSLLEGQDAKMAGIAIREASSGGGGSSSNFHINVEESVDGQVVSSHKREI

SEQ ID NO: 109 - protein, 534 aa, Homo sapiens
MIARQQCVRGGPRGFSCGSAIVGGGKRGAFSSVSMSGGAGRCSSGGFGSRSLYNLRGNKSISMSVAGSRQGACFGGAGGFGTGGFGAGGFGAGFGTGGFGGGFGGSFSGKGGPGFPVCPAGGIQEVTINQSLLTPLHVEIDPEIQKVRTEEREQIKLLNNKFASFIDKVQFLEQQNKVLETKWNLLQQQTTTTSSKNLEPLFETYLSVLRKQLDTLGNDKGRLQSELKTMQDSVEDFKTKYEEEINKRTAAENDFVVLKKDVDAAYLNKVELEAKVDSLNDEINFLKVLYDAELSQMQTHVSDTSVVLSMDNNRNLDLDSIIAEVRAQYEEIAQRSKAEAEALYQTKVQQLQISVDQHGDNLKNTKSEIAELNRMIQRLRAEIENIKKQCQTLQVSVADAEQRGENALKDAHSKRVELEAALQQAKEELARMLREYQELMSVKLALDIEIATYRKLLEGEEYRMSGECQSAVSISVVSGSTSTGGISGGLGSGSGFGLSSGFGSGSGSGFGFGGSVSGSSSSKIISTTTLNKRR

SEQ ID NO: 110 - protein, 946 aa, Homo sapiens
MKRLTCFFICFFLSEVSGFEIPINGLSEFVDYEDLVELAPGKFQLVAENRRYQRSLPGESEEMMEEVDQVTLYSYKVQSTITSRMATTMIQSKVVNNSPQPQNVVFDVQIPKGAFISNFSMTVDGKTFRSSIKEKTVGRALYAQARAKGKTAGLVRSSALDMENFRTEVNVLPGAKVQFELHYQEVKWRKLGSYEHRIYLQPGRLAKHLEVDVWVIEPQGLRFLHVPDTFEGHFDGVPVISKGQQKAHVSFKPTVAQQRICPNCRETAVDGELVVLYDVKREEKAGELEVFNGYFVHFFAPDNLDPIPKNILFVIDVSGSMWGVKMKQTVEAMKTILDDLRAEDHFSVIDFNQNIRTWRNDLISATKTQVADAKRYIEKIQPSGGTNINEALLRAIFILNEANNLGLLDPNSVSLIILVSDGDPTVGELKLSKIQKNVKENIQDNISLFSLGMGFDVDYDFLKRLSNENHGIAQRIYGNQDTSSQLKKFYNQVSTPLLRNVQFNYPHTSVTDVTQNNFHNYFGGSEIVVAGKFDPAKLDQIESVITATSANTQLVLETLAQMDDLQDFLSKDKHADPDFTRKLWAYLTINQLLAERSLAPTAAAKRRITRSILQMSLDHHIVTPLTSLVIENEAGDERMLADAPPQDPSCCSGALYYGSKVVPDSTPSWANPSPTPVISMLAQGSQVLESTPPPHVMRVENDPHFIIYLPKSQKNICFNIDSEPGKILNLVSDPESGIVVNGQLVGAKKPNNGKLSTYFGKLGFYFQSEDIKIEISTETITLSHGSSTFSLSWSDTAQVTNQRVQISVKKEKVVTITLDKEMSFSVLLHRVWKKHPVNVDFLGIYIPPTNKFSPKAHGLIGQFMQEPKIHIFNERPGKDPEKPEASMEVKGQKLIITRGLQKDYRTDLVFGTDVTCWFVHNSGKGFIDGHYKDYFVPQLYSFLKRP

SEQ ID NO: 111 - protein, 911 aa, Homo sapiens
MDGAMGPRGLLLCMYLVSLLILQAMPALGSATGRSKSSEKRQAVDTAVDGVFIRSLKVNCKVTSRFAHYVVTSQVVNTANEAREVAFDLEIPKTAFISDFAVTADGNAFIGDIKDKVTAWKQYRKAAISGENAGLVRASGRTMEQFTIHLTVNPQSKVTFQLTYEEVLKRNHMQYEIVIKVKPKQLVHHFEIDVDIFEPQGISKLDAQASFLPKELAAQTIKKSFSGKKGHVLFRPTVSQQQSCPTCSTSLLNGHFKVTYDVSRDKICDLLVANNHFAHFFAPQNLTNMNKNVVFVIDISGSMRGQKVKQTKEALLKILGDMQPGDYFDLVLFGTRVQSWKGSLVQASEANLQAAQDFVRGFSLDEATNLNGGLLRGIEILNQVQESLPELSNHASILIMLTDGDPTEGVTDRSQILKNVRNAIRGRFPLYNLGFGHNVDFNFLEVMSMENNGRAQRIYEDHDATQQLQGFYSQVAKPLLVDVDLQYPQDAVLALTQNHHKQYYEGSEIVVAGRIADNKQSSFKADVQAHGEGQEFSITCLVDEEEMKKLLRERGHMLENHVERLWAYLTIQELLAKRMKVDREERANLSSQALQMSLDYGFVTPLTSMSIRGMADQDGLKPTIDKPSEDSPPLEMLGPRRTFVLSALQPSPTHSSSNTQRLPDRVTGVDTDPHFIIHVPQKEDTLCFNINEEPGVILSLVQDPNTGFSVNGQLIGNKARSPGQHDGTYFGRLGIANPATDFQLEVTPQNITLNPGFGGPVFSWRDQAVLRQDGVVVTINKKRNLVVSVDDGGTFEVVLHRVWKGSSVHQDFLGFYVLDSHRMSARTHGLLGQFFHPIGFEVSDIHPGSDPTKPDATMVVRNRRLTVTRGLQKDYSKDPWHGAEVSCWFIHNNGAGLIDGAYTDYIVPDIF

SEQ ID NO: 112 - protein, 1033 aa, Homo sapiens
MGAAGLLGVFLALVAPGVLGISCGSPPPILNGRISYYSTPIAVGTVIRYSCSGTFRLIGEKSLLCITKDKVDGTWDKPAPKCEYFNKYSSCPEPIVPGGYKIRGSTPYRHGDSVTFACKTNFSMNGNKSVWCQANNMWGPTRLPTCVSVFPLECPALPMIHNGHHTSENVGSIAPGLSVTYSCESGYLLVGEKIINCLSSGKWSAVPPTCEEARCKSLGRFPNGKVKEPPILRVGVTANFFCDEGYRLQGPPSSRCVIAGQGVAWTKMPVCEEIFCPSPPPILNGRHIGNSLANVSYGSIVTYTCDPDPEEGVNFILIGESTLRCTVDSQKTGTWSGPAPRCELSTSAVQCPHPQILRGRMVSGQKDRYTYNDTVIFACMFGFTLKGSKQIRCNAQGTWEPSAPVCEKECQAPPNILNGQKEDRHMVRFDPGTSIKYSCNPGYVLVGEESIQCTSEGVWTPPVPQCKVAACEATGRQLLTKPQHQFVRPDVNSSCGEGYKLSGSVYQECQGTIPWFMEIRLCKEITCPPPPVIYNGAHTGSSLEDFPYGTTVTYTCNPGPERGVEFSLIGESTIRCTSNDQERGTWSGPAPLCKLSLLAVQCSHVHIANGYKISGKEAPYFYNDTVTFKCYSGFTLKGSSQIRCKADNTWDPEIPVCEKETCQHVRQSLQELPAGSRVELVNTSCQDGYQLTGHAYQMCQDAENGIWFKKIPLCKVIHCHPPPVIVNGKHTGMMAENFLYGNEVSYECDQGFYLLGEKKLQCRSDSKGHGSWSGPSPQCLRSPPVTRCPNPEVKHGYKLNKTHSAYSHNDIVYVDCNPGFIMNGSRVIRCHTDNTWVPGVPTCIKKAFIGCPPPPKTPNGNHTGGNIARFSPGMSILYSCDQGYLLVGEALLLCTHEGTWSQPAPHCKEVNCSSPADMDGIQKGLEPRKMYQYGAVVTLECEDGYMLEGSPQSQCQSDHQWNPPLAVCRSRSLAPVLCGIAAGLILLTFLIVITLYVISKHRARNYYTDTSQKEAFHLEAREVYSVDPYNPAS

SEQ ID NO: 113 - protein, 252 aa, Homo sapiens
MFFWCACCLMVAWRVSASDAEHCPELPPVDNSIFVAKEVEGQILGTYVCIKGYHLVGKKTLFCNASKEWDNTTTECRLGHCPDPVLVNGEFSSSGPVNVSDKITFMCNDHYILKGSNRSQCLEDHTWAPPFPICKSRDCDPPGNPVHGYFEGNNFTLGSTISYYCEDRYYLVGVQEQQCVDGEWSSALPVCKLIQEAPKPECEKALLAFQESKNLCEAMENFMQQLKESGMTMEELKYSLELKKAELKAKLL

SEQ ID NO: 114 - protein, 712 aa, Homo sapiens
MRVLLHLPALLASLILLQAAASTTRAQTTRTSAISDTVSQAKVQVNKAFLDSRTRLKTAMSSETPTSRQLSEYLKHAKGRTRTAIRNGQVWEESLKRLRQKASLTNVTDPSLDLTSLSLEVGCGAPAPVVRCDPCSPYRTITGDCNNRRKPALGAANRALARWLPAEYEDGLSLPFGWTPGKTRNGFPLPLAREVSNKIVGYLNEEGVLDQNRSLLFMQWGQIVDHDLDFAPDTELGSSEYSKAQCDEYCIQGDNCFPIMFPPNDPKAGTQGKCMPFFRAGFVCPTPPYKSLAREQINALTSFLDASFVYSSEPSLASRLRNLSSPLGLMAVNQEVSDHGLPYLPYDSKKPSPCEFINTTARVPCFLAGDSRASEHILLATSHTLFLREHNRLARELKRLNPQWDGEKLYQEARKILGAFVQIITFRDYLPILLGDHMQKWIPPYQGYSESVDPRISNVFTFAFRFGHLEVPSSMFRLDENYQPWGPEPELPLHTLFFNTWRMVKDGGIDPLVRGLLAKKSKLMKQNKMMTGELRNKLFQPTHRIHGFDLAAINTQRCRDHGQPGYNSWRAFCDLSQPQTLEELNTVLKSKMLAKKLLGLYGTPDNIDIWIGAIAEPLVERGRVGPLLACLLGKQFQQIRDGDRFWWENPGVFTNEQKDSLQKMSFSRLVCDNTRITKVPRDPFWANSYPYDFVDCSAIDKLDLSPWASVKN

SEQ ID NO: 115 - protein, 258 aa, Homo sapiens
MLPLCLVAALLLAAGPGPSLGDEAIHCPPCSEEKLARCRPPVGCEELVREPGCGCCATCALGLGMPCGVYTPRCGSGLRCYPPRGVEKPLHTLMHGQGVCMELAEIEAIQESLQPSDKDEGDHPNNSFSPCSAHDRRCLQKHFAKIRDRSTSGGKMKVNGAPREDARPVPQGSCQSELHRALERLAASQSRTHEDLYIIPIPNCDRNGNFHPKQCHPALDGQRGKCWCVDRKTGVKLPGGLEPKGELDCHQLADSFRE

SEQ ID NO: 116 - protein, 545 aa, Homo sapiens
MLPGAWLLWTSLLLLARPAQPCPMGCDCFVQEVFCSDEELATVPLDIPPYTKNIIFVETSFTTLETRAFGSNPNLTKVVFLNTQLCQFRPDAFGGLPRLEDLEVTGSSFLNLSTNIFSNLTSLGKLTLNFNMLEALPEGLFQHLAALESLHLQGNQLQALPRRLFQPLTHLKTLNLAQNLLAQLPEELFHPLTSLQTLKLSNNALSGLPQGVFGKLGSLQELFLDSNNISELPPQVFSQLFCLERLWLQRNAITHLPLSIFASLGNLTFLSLQWNMLRVLPAGLFAHTPCLVGLSLTHNQLETVAEGTFAHLSNLRSLMLSYNAITHLPAGIFRDLEELVKLYLGSNNLTALHPALFQNLSKLELLSLSKNQLTTLPEGIFDTNYNLFNLALHGNPWQCDCHLAYLFNWLQQYTDRLLNIQTYCAGPAYLKGQVVPALNEKQLVCPVTRDHLGFQVTWPDESKAGGSWDLAVQERAARSQCTYSNPEGTVVLACDQAQCRWLNVQLSPQQGSLGLQYNASQEWDLRSSCGSLRLTVSIEARAAGP

SEQ ID NO: 117 - protein, 703 aa, Homo sapiens
MERAAPSRRVPLPLLLLGGLALLAAGVDADVLLEACCADGHRMATHQKDCSLPYATESKECRMVQEQCCHSQLEELHCATGISLANEQDRCATPHGDNASLEATFVKRCCHCCLLGRAAQAQGQSCEYSLMVGYQCGQVFQACCVKSQETGDLDVGGLQETDKIIEVEEEQEDPYLNDRCRGGGPCKQQCRDTGDEVVCSCFVGYQLLSDGVSCEDVNECITGSHSCRLGESCINTVGSFRCQRDSSCGTGYELTEDNSCKDIDECESGIHNCLPDFICQNTLGSFRCRPKLQCKSGFIQDALGNCIDINECLSISAPCPIGHTCINTEGSYTCQKNVPNCGRGYHLNEEGTRCVDVDECAPPAEPCGKGHRCVNSPGSFRCECKTGYYFDGISRMCVDVNECQRYPGRLCGHKCENTLGSYLCSCSVGFRLSVDGRSCEDINECSSSPCSQECANVYGSYQCYCRRGYQLSDVDGVTCEDIDECALPTGGHICSYRCINIPGSFQCSCPSSGYRLAPNGRNCQDIDECVTGIHNCSINETCFNIQGGFRCLAFECPENYRRSAATLQQEKTDTVRCIKSCRPNDVTCVFDPVHTISHTVISLPTFREFTRPEEIIFLRAITPPHPASQANIIFDITEGNLRDSFDIIKRYMDGMTVGVVRQVRPIVGPFHAVLKLEMNYVVGGVVSHRNVVNVHIFVSEYWF

SEQ ID NO: 118 - protein, 711 aa, Homo sapiens
MGWLPLLLLLTQCLGVPGQRSPLNDFQVLRGTELQHLLHAVVPGPWQEDVADAEECAGRCGPLMDCRAFHYNVSSHGCQLLPWTQHSPHTRLRRSGRCDLFQKKDYVRTCIMNNGVGYRGTMATTVGGLPCQAWSHKFPNDHKYTPTLRNGLEENFCRNPDGDPGGPWCYTTDPAVRFQSCGIKSCREAACVWCNGEEYRGAVDRTESGRECQRWDLQHPHQHPFEPGKFLDQGLDDNYCRNPDGSERPWCYTTDPQIEREFCDLPRCGSEAQPRQEATTVSCFRGKGEGYRGTANTTTAGVPCQRWDAQIPHQHRFTPEKYACKDLRENFCRNPDGSEAPWCFTLRPGMRAAFCYQIRRCTDDVRPQDCYHGAGEQYRGTVSKTRKGVQCQRWSAETPHKPQFTFTSEPHAQLEENFCRNPDGDSHGPWCYTMDPRTPFDYCALRRCADDQPPSILDPPDQVQFEKCGKRVDRLDQRRSKLRVVGGHPGNSPWTVSLRNRQGQHFCGGSLVKEQWILTARQCFSSCHMPLTGYEVWLGTLFQNPQHGEPSLQRVPVAKMVCGPSGSQLVLLKLERSVTLNQRVALICLPPEWYVVPPGTKCEIAGWGETKGTGNDTVLNVALLNVISNQECNIKHRGRVRESEMCTEGLLAPVGACEGDYGGPLACFTHNCWVLEGIIIPNRVCARSRWPAVFTRVSVFVDWIHKVMRLG

SEQ ID NO: 119 - protein, 469 aa, Homo sapiens
MITEGAQAPRLLLPPLLLLLTLPATGSDPVLCFTQYEESSGKCKGLLGGGVSVEDCCLNTAFAYQKRSGGLCQPCRSPRWSLWSTWAPCSVTCSEGSQLRYRRCVGWNGQCSGKVAPGTLEWQLQACEDQQCCPEMGGWSGWGPWEPCSVTCSKGTRTRRRACNHPAPKCGGHCPGQAQESEACDTQQVCPTHGAWATWGPWTPCSASCHGGPHEPKETRSRKCSAPEPSQKPPGKPCPGLAYEQRRCTGLPPCPVAGGWGPWGPVSPCPVTCGLGQTMEQRTCNHPVPQHGGPFCAGDATRTHICNTAVPCPVDGEWDSWGEWSPCIRRNMKSISCQEIPGQQSRGRTCRGRKFDGHRCAGQQQDIRHCYSIQHCPLKGSWSEWSTWGLCMPPCGPNPTRARQRLCTPLLPKYPPTVSMVEGQGEKNVTFWGRPLPRCEELQGQKLVVEEKRPCLHVPACKDPEEEEL

SEQ ID NO: 120 - protein, 593 aa, Homo sapiens
MWTLVSWVALTAGLVAGTRCPDGQFCPVACCLDPGGASYSCCRPLLDKWPTTLSRHLGGPCQVDAHCSAGHSCIFTVSGTSSCCPFPEAVACGDGHHCCPRGFHCSADGRSCFQRSGNNSVGAIQCPDSQFECPDFSTCCVMVDGSWGCCPMPQASCCEDRVHCCPHGAFCDLVHTRCITPTGTHPLAKKLPAQRTNRAVALSSSVMCPDARSRCPDGSTCCELPSGKYGCCPMPNATCCSDHLHCCPQDTVCDLIQSKCLSKENATTDLLTKLPAHTVGDVKCDMEVSCPDGYTCCRLQSGAWGCCPFTQAVCCEDHIHCCPAGFTCDTQKGTCEQGPHQVPWMEKAPAHLSLPDPQALKRDVPCDNVSSCPSSDTCCQLTSGEWGCCPIPEAVCCSDHQHCCPQGYTCVAEGQCQRGSEIVAGLEKMPARRASLSHPRDIGCDQHTSCPVGQTCCPSLGGSWACCQLPHAVCCEDRQHCCPAGYTCNVKARSCEKEVVSAQPATFLARSPHVGVKDVECGEGHFCHDNQTCCRDNRQGWACCPYRQGVCCADRRHCCPAGFRCAARGTKCLRREAPRWDAPLRDPALRQLL

SEQ ID NO: 121 - protein, 349 aa, Homo sapiens
MTAASMGPVRVAFVVLLALCSRPAVGQNCSGPCRCPDEPAPRCPAGVSLVLDGCGCCRVCAKQLGELCTERDPCDPHKGLFCHFGSPANRKIGVCTAKDGAPCIFGGTVYRSGESFQSSCKYQCTCLDGAVGCMPLCSMDVRLPSPDCPFPRRVKLPGKCCEEWVCDEPKDQTVVGPALAAYRLEDTFGPDPTMIRANCLVQTTEWSACSKTCGMGISTRVTNDNASCRLEKQSRLCMVRPCEADLEENIKKGKKCIRTPKISKPIKFELSGCTSMKTYRAKFCGVCTDGRCCTPHRTTTLPVEFKCPDGEVMKKNMMFIKTCACHYNCPGDNDIFESLYYRKMYGDMA

SEQ ID NO: 122 - protein, 784 aa, Homo sapiens
MQRLMMLLATSGACLGLLAVAAVAAAGANPAQRDTHSLLPTHRRQKRDWIWNQMHIDEEKNTSLPHHVGKIKSSVSRKNAKYLLKGEYVGKVFRVDAETGDVFAIERLDRENISEYHLTAVIVDKDTGENLETPSSFTIKVHDVNDNWPVFTHRLFNASVPESSAVGTSVISVTAVDADDPTVGDHASVMYQILKGKEYFAIDNSGRIITITKSLDREKQARYEIVVEARDAQGLRGDSGTATVLVTLQDINDNFPFFTQTKYTFVVPEDTRVGTSVGSLFVEDPDEPQNRMTKYSILRGDYQDAFTIETNPAHNEGIIKPMKPLDYEYIQQYSFIVEATDPTIDLRYMSPPAGNRAQVIINITDVDEPPIFQQPFYHFQLKENQKKPLIGTVLAMDPDAARHSIGYSIRRTSDKGQFFRVTKKGDIYNEKELDREVYPWYNLTVEAKELDSTGTPTGKESIVQVHIEVLDENDNAPEFAKPYQPKVCENAVHGQLVLQISAIDKDITPRNVKFKFILNTENNFTLTDNHDNTANITVKYGQFDREHTKVHFLPVVISDNGMPSRTGTSTLTVAVCKCNEQGEFTFCEDMAAQVGVSIQAVVAILLCILTITVITLLIFLRRRLRKQARAHGKSVPEIHEQLVTYDEEGGGEMDTTSYDVSVLNSVRRGGAKPPRPALDARPSLYAQVQKPPRHAPGAHGGPGEMAAMIEVKKDEADHDGDGPPYDTLHIYGYEGSESIAESLSSLGTDSSDSDVDYDFLNDWGPRFKMLAELYGSDPREELLY

SEQ ID NO: 123 - protein, 147 aa, Homo sapiens
MALQRTHSLLLLLLLTLLGLGLVQPSYGQDGMYQRFLRQHVHPEETGGSDRYCNLMMQRRKMTLYHCKRFNTFIHEDIWNIRSICSTTNIQCKNGKMNCHEGVVKVTDCRDTGSSRAPNCRYRAIASTRRVVIACEGNPQVPVHFDG

SEQ ID NO: 124 - protein, 605 aa, Homo sapiens
MALRKGGLALALLLLSWVALGPRSLEGADPGTPGEAEGPACPAACVCSYDDDADELSVFCSSRNLTRLPDGVPGGTQALWLDGNNLSSVPPAAFQNLSSLGFLNLQGGQLGSLEPQALLGLENLCHLHLERNQLRSLALGTFAHTPALASLGLSNNRLSRLEDGLFEGLGSLWDLNLGWNSLAVLPDAAFRGLGSLRELVLAGNRLAYLQPALFSGLAELRELDLSRNALRAIKANVFVQLPRLQKLYLDRNLIAAVAPGAFLGLKALRWLDLSHNRVAGLLEDTFPGLLGLRVLRLSHNAIASLRPRTFKDLHFLEELQLGHNRIRQLAERSFEGLGQLEVLTLDHNQLQEVKAGAFLGLTNVAVMNLSGNCLRNLPEQVFRGLGKLHSLHLEGSCLGRIRPHTFTGLSGLRRLFLKDNGLVGIEEQSLWGLAELLELDLTSNQLTHLPHRLFQGLGKLEYLLLSRNRLAELPADALGPLQRAFWLDVSHNRLEALPNSLLAPLGRLRYLSLRNNSLRTFTPQPPGLERLWLEGNPWDCGCPLKALRDFALQNPSAVPRFVQAICEGDDCQPPAYTYNNITCASPPEVVGLDLRDLSEAHFAPC

SEQ ID NO: 125 - protein, 418 aa, Homo sapiens
MQALVLLLCIGALLGHSSCQNPASPPEEGSPDPDSTGALVEEEDPFFKVPVNKLAAAVSNFGYDLYRVRSSTSPTTNVLLSPLSVATALSALSLGAEQRTESIIHRALYYDLISSPDIHGTYKELLDTVTAPQKNLKSASRIVFEKKLRIKSSFVAPLEKSYGTRPRVLTGNPRLDLQEINNWVQAQMKGKLARSTKEIPDEISILLLGVAHFKGQWVTKFDSRKTSLEDFYLDEERTVRVPMMSDPKAVLRYGLDSDLSCKIAQLPLTGSMSIIFFLPLKVTQNLTLIEESLTSEFIHDIDRELKTVQAVLTVPKLKLSYEGEVTKSLQEMKLQSLFDSPDFSKITGKPIKLTQVEHRAGFEWNEDGAGTTPSPGLQPAHLTFPLDYHLNQPFIFVLRDTDTGALLFIGKILDPRGP

SEQ ID NO: 126 - protein, 599 aa, Homo sapiens
MKLLKLTGFIFFLFFLTESLTLPTQPRDIENFNSTQKFIEDNIEYITIIAFAQYVQEATFEEMEKLVKDMVEYKDRCMADKTLPECSKLPNNVLQEKICAMEGLPQKHNFSHCCSKVDAQRRLCFFYNKKSDVGFLPPFPTLDPEEKCQAYESNRESLLNHFLYEVARRNPFVFAPTLLTVAVHFEEVAKSCCEEQNKVNCLQTRAIPVTQYLKAFSSYQKHVCGALLKFGTKVVHFIYIAILSQKFPKIEFKELISLVEDVSSNYDGCCEGDVVQCIRDTSKVMNHICSKQDSISSKIKECCEKKIPERGQCIINSNKDDRPKDLSLREGKFTDSENVCQERDADPDTFFAKFTFEYSRRHPDLSIPELLRIVQIYKDLLRNCCNTENPPGCYRYAEDKFNETTEKSLKMVQQECKHFQNLGKDGLKYHYLIRLTKIAPQLSTEELVSLGEKMVTAFTTCCTLSEEFACVDNLADLVFGELCGVNENRTINPAVDHCCKTNFAFRRPCFESLKADKTYVPPPFSQDLFTFHADMCQSQNEELQRKTDRFLVNLVKLKHELTDEELQSLFTNFANVVDKCCKAESPEVCFNEESPKIGN

SEQ ID NO: 127 - protein, 381 aa, Homo sapiens
  MOD_RES (59)..(59): Selenocysteine
  MOD_RES (300)..(300): Selenocysteine
  MOD_RES (318)..(318): Selenocysteine
  MOD_RES (330)..(330): Selenocysteine
  MOD_RES (345)..(345): Selenocysteine
  MOD_RES (352)..(352): Selenocysteine
  MOD_RES (367)..(367): Selenocysteine
  MOD_RES (369)..(369): Selenocysteine
  MOD_RES (376)..(376): Selenocysteine
  MOD_RES (378)..(378): Selenocysteine
MWRSLGLALALCLLPSGGTESQDQSSLCKQPPAWSIRDQDPMLNSNGSVTVVALLQASXYLCILQASKLEDLRVKLKKEGYSNISYIVVNHQGISSRLKYTHLKNKVSEHIPVYQQEENQTDVWTLLNGSKDDFLIYDRCGRLVYHLGLPFSFLTFPYVEEAIKIAYCEKKCGNCSLTTLKDEDFCKRVSLATVDKTVETPSPHYHHEHHHNHGHQHLGSSELSENQQPGAPNAPTHPAPPGLHHHHKHKGQHRQGHPENRDMPASEDLQDLQKKLCRKRCINQLLCKLPTDSELAPRSXCCHCRHLIFEKTGSAITXQCKENLPSLCSXQGLRAEENITESCQXRLPPAAXQISQQLIPTEASASXRXKNQAKKXEXPSN

SEQ ID NO: 128 - protein, 463 aa, Homo sapiens
MGAGPSLLLAALLLLLSGDGAVRCDTPANCTYLDLLGTWVFQVGSSGSQRDVNCSVMGPQEKKVVVYLQKLDTAYDDLGNSGHFTIIYNQGFEIVLNDYKWFAFFKYKEEGSKVTTYCNETMTGWVHDVLGRNWACFTGKKVGTASENVYVNIAHLKNSQEKYSNRLYKYDHNFVKAINAIQKSWTATTYMEYETLTLGDMIRRSGGHSRKIPRPKPAPLTAEIQQKILHLPTSWDWRNVHGINFVSPVRNQASCGSCYSFASMGMLEARIRILTNNSQTPILSPQEVVSCSQYAQGCEGGFPYLIAGKYAQDFGLVEEACFPYTGTDSPCKMKEDCFRYYSSEYHYVGGFYGGCNEALMKLELVHHGPMAVAFEVYDDFLHYKKGIYHHTGLRDPFNPFELTNHAVLLVGYGTDSASGMDYWIVKNSWGTGWGENGYFRIRRGTDECAIESIAVAATPIPKL

SEQ ID NO: 129 - protein, 127 aa, Homo sapiens
MSLLRNRLQALPALCLCVLVLACIGACQPEAQEGTLSPPPKLKMSRWSLVRGRMKELLETVVNRTRDGWQWFWSPSTFRGFMQTYYDDHLRDLGPLTKAWFLESKDSLLKKTHSLCPRLVCGDKDQG

SEQ ID NO: 130 - protein, 119 aa, Homo sapiens
MSRSVALAVLALLSLSGLEAIQRTPKIQVYSRHPAENGKSNFLNCYVSGFHPSDIEVDLLKNGERIEKVEHSDLSFSKDWSFYLLYYTEFTPTEKDEYACRVNHVTLSQPKIVKWDRDM

SEQ ID NO: 131 - protein, 375 aa, Homo sapiens
MEEEIAALVIDNGSGMCKAGFAGDDAPRAVFPSIVGRPRHQGVMVGMGQKDSYVGDEAQSKRGILTLKYPIEHGIVTNWDDMEKIWHHTFYNELRVAPEEHPVLLTEAPLNPKANREKMTQIMFETFNTPAMYVAIQAVLSLYASGRTTGIVMDSGDGVTHTVPIYEGYALPHAILRLDLAGRDLTDYLMKILTERGYSFTTTAEREIVRDIKEKLCYVALDFEQEMATAASSSSLEKSYELPDGQVITIGNERFRCPEALFQPSFLGMESCGIHETTFNSIMKCDVDIRKDLYANTVLSGGTTMYPGIADRMQKEITALAPSTMKIKIIAPPERKYSVWIGGSILASLSTFQQMWISKQEYDESGPSIVHRKCF

SEQ ID NO: 132 - protein, 248 aa, Homo sapiens
MAGLNSLEAVKRKIQALQQQADEAEDRAQGLQRELDGERERREKAEGDVAALNRRIQLVEEELDRAQERLATALQKLEEAEKAADESERGMKVIENRAMKDEEKMEIQEMQLKEAKHIAEEADRKYEEVARKLVILEGELERAEERAEVSELKCGDLEEELKNVTNNLKSLEAASEKYSEKEDKYEEEIKLLSDKLKEAETRAEFAERTVAKLEKTIDDLEEKLAQAKEENVGLHQTLDQTLNELNCI

SEQ ID NO: 133 - protein, 147 aa, Homo sapiens
MVHLTPEEKSAVTALWGKVNVDEVGGEALGRLLVVYPWTQRFFESFGDLSTPDAVMGNPKVKAHGKKVLGAFSDGLAHLDNLKGTFATLSELHCDKLHVDPENFRLLGNVLVCVLAHHFGKEFTPPVQAAYQKVVAGVANALAHKYH

SEQ ID NO: 134 - protein, 840 aa, Homo sapiens
MSAFRLWPGLLIMLGSLCHRGSPCGLSTHVEIGHRALEFLQLHNGRVNYRELLLEHQDAYQAGIVFPDCFYPSICKGGKFHDVSESTHWTPFLNASVHYIRENYPLPWEKDTEKLVAFLFGITSHMAADVSWHSLGLEQGFLRTMGAIDFHGSYSEAHSAGDFGGDVLSQFEFNFNYLARRWYVPVKDLLGIYEKLYGRKVITENVIVDCSHIQFLEMYGEMLAVSKLYPTYSTKSPFLVEQFQEYFLGGLDDMAFWSTNIYHLTSFMLENGTSDCNLPENPLFIACGGQQNHTQGSKMQKNDFHRNLTTSLTESVDRNINYTERGVFFSVNSWTPDSMSFIYKALERNIRTMFIGGSQLSQKHVSSPLASYFLSFPYARLGWAMTSADLNQDGHGDLVVGAPGYSRPGHIHIGRVYLIYGNDLGLPPVDLDLDKEAHRILEGFQPSGRFGSALAVLDFNVDGVPDLAVGAPSVGSEQLTYKGAVYVYFGSKQGGMSSSPNITISCQDIYCNLGWTLLAADVNGDSEPDLVIGSPFAPGGGKQKGIVAAFYSGPSLSDKEKLNVEAANWTVRGEEDFSWFGYSLHGVTVDNRTLLLVGSPTWKNASRLGHLLHIRDEKKSLGRVYGYFPPNGQSWFTISGDKAMGKLGTSLSSGHVLMNGTLKQVLLVGAPTYDDVSKVAFLTVTLHQGGATRMYALTSDAQPLLLSTFSGDRRFSRFGGVLHLSDLDDDGLDEIIMAAPLRIADVTSGLIGGEDGRVYVYNGKETTLGDMTGKCKSWITPCPEEKAQYVLISPEASSRFGSSLITVRSKAKNQVVIAAGRSSLGARLSGALHVYSLGSD

SEQ ID NO: 135 - protein, 1049 aa, Homo sapiens
MDWSFFRVVAMLFIFLVVVEVNSEFRIQVRDYNTKNGTIKWHSIRRQKREWIKFAAACREGEDNSKRNPIAKIHSDCAANQQVTYRISGVGIDQPPYGIFVINQKTGEINITSIVDREVTPFFIIYCRALNSMGQDLERPLELRVRVLDINDNPPVFSMATFAGQIEENSNANTLVMILNATDADEPNNLNSKIAFKIIRQEPSDSPMFIINRNTGEIRTMNNFLDREQYGQYALAVRGSDRDGGADGMSAECECNIKILDVNDNIPYMEQSSYTIEIQENTLNSNLLEIRVIDLDEEFSANWMAVIFFISGNEGNWFEIEMNERTNVGILKVVKPLDYEAMQSLQLSIGVRNKAEFHHSIMSQYKLKASAISVTVLNVIEGPVFRPGSKTYVVTGNMGSNDKVGDFVATDLDTGRPSTTVRYVMGNNPADLLAVDSRTGKLTLKNKVTKEQYNMLGGKYQGTILSIDDNLQRTCTGTININIQSFGNDDRTNTEPNTKITTNTGRQESTSSTNYDTSTTSTDSSQVYSSEPGNGAKDLLSDNVHFGPAGIGLLIMGFLVLGLVPFLMICCDCGGAPRSAAGFEPVPECSDGAIHSWAVEGPQPEPRDITTVIPQIPPDNANIIECIDNSGVYTNEYGGREMQDLGGGERMTGFELTEGVKTSGMPEICQEYSGTLRRNSMRECREGGLNMNFMESYFCQKAYAYADEDEGRPSNDCLLIYDIEGVGSPAGSVGCCSFIGEDLDDSFLDTLGPKFKKLADISLGKESYPDLDPSWPPQSTEPVCLPQETEPVVSGHPPISPHFGTTTVISESTYPSGPGVLHPKPILDPLGYGNVTVTESYTTSDTLKPSVHVHDNRPASNVVVTERVVGPISGADLHGMLEMPDLRDGSNVIVTERVIAPSSSLPTSLTIHHPRESSNVVVTERVIQPTSGMIGSLSMHPELANAHNVIVTERVVSGAGVTGISGTTGISGGIGSSGLVGTSMGAGSGALSGAGISGGGIGLSSLGGTASIGHMRSSSDHHFNQTIGSASPSTARSRITKYSTVQYSK

SEQ ID NO: 136 - protein, 851 aa, Homo sapiens
MTSHYVIAIFALMSSCLATAGPEPGALCELSPVSASHPVQALMESFTVLSGCASRGTTGLPQEVHVLNLRTAGQGPGQLQREVTLHLNPISSVHIHHKSVVFLLNSPHPLVWHLKTERLATGVSRLFLVSEGSVVQFSSANFSLTAETEERNFPHGNEHLLNWARKEYGAVTSFTELKIARNIYIKVGEDQVFPPKCNIGKNFLSLNYLAEYLQPKAAEGCVMSSQPQNEEVHIIELITPNSNPYSAFQVDITIDIRPSQEDLEVVKNLILILKCKKSVNWVIKSFDVKGSLKIIAPNSIGFGKESERSMTMTKSIRDDIPSTQGNLVKWALDNGYSPITSYTMAPVANRFHLRLENNAEEMGDEEVHTIPPELRILLDPGALPALQNPPIRGGEGQNGGLPFPFPDISRRVWNEEGEDGLPRPKDPVIPSIQLFPGLREPEEVQGSVDIALSVKCDNEKMIVAVEKDSFQASGYSGMDVTLLDPTCKAKMNGTHFVLESPLNGCGTRPRWSALDGVVYYNSIVIQVPALGDSSGWPDGYEDLESGDNGFPGDMDEGDASLFTRPEIVVFNCSLQQVRNPSSFQEQPHGNITFNMELYNTDLFLVPSQGVFSVPENGHVYVEVSVTKAEQELGFAIQTCFISPYSNPDRMSHYTIIENICPKDESVKFYSPKRVHFPIPQADMDKKRFSFVFKPVFNTSLLFLQCELTLCTKMEKHPQKLPKCVPPDEACTSLDASIIWAMMQNKKTFTKPLAVIHHEAESKEKGPSMKEPNPISPPIFHGLDTLTVMGIAFAAFVIGALLTGALWYIYSHTGETAGRQQVPTSPPASENSSAAHSIGSTQSTPCSSSSTA

SEQ ID NO: 137 - protein, 655 aa, Homo sapiens
MGRWAWVPSPWPPPGLGPFLLLLLLLLLLPRGFQPQPGGNRTESPEPNATATPAIPTILVTSVTSETPATSAPEAEGPQSGGLPPPPRAVPSSSSPQAQALTEDGRPCRFPFRYGGRMLHACTSEGSAHRKWCATTHNYDRDRAWGYCVEATPPPGGPAALDPCASGPCLNGGSCSNTQDPQSYHCSCPRAFTGKDCGTEKCFDETRYEYLEGGDRWARVRQGHVEQCECFGGRTWCEGTRHTACLSSPCLNGGTCHLIVATGTTVCACPPGFAGRLCNIEPDERCFLGNGTGYRGVASTSASGLSCLAWNSDLLYQELHVDSVGAAALLGLGPHAYCRNPDNDERPWCYVVKDSALSWEYCRLEACESLTRVQLSPDLLATLPEPASPGRQACGRRHKKRTFLRPRIIGGSSSLPGSHPWLAAIYIGDSFCAGSLVHTCWVVSAAHCFSHSPPRDSVSVVLGQHFFNRTTDVTQTFGIEKYIPYTLYSVFNPSDHDLVLIRLKKKGDRCATRSQFVQPICLPEPGSTFPAGHKCQIAGWGHLDENVSGYSSSLREALVPLVADHKCSSPEVYGADISPNMLCAGYFDCKSDACQGDSGGPLACEKNGVAYLYGIISWGDGCGRLHKPGVYTRVANYVDWINDRIRPPRRLVAPS

SEQ ID NO: 138 - protein, 890 aa, Homo sapiens
MAFAWWPCLILALLSSLAASGFPRSPFRLLGKRSLPEGVANGIEVYSTKINSKVTSRFAHNVVTMRAVNRADTAKEVSFDVELPKTAFITNFTLTIDGVTYPGNVKEKEVAKKQYEKAVSQGKTAGLVKASGRKLEKFTVSVNVAAGSKVTFELTYEELLKRHKGKYEMYLKVQPKQLVKHFEIEVDIFEPQGISMLDAEASFITNDLLGSALTKSFSGKKGHVSFKPSLDQQRSCPTCTDSLLNGDFTITYDVNRESPGNVQIVNGYFVHFFAPQGLPVVPKNVAFVIDISGSMAGRKLEQTKEALLRILEDMQEEDYLNFILFSGDVSTWKEHLVQATPENLQEARTFVKSMEDKGMTNINDGLLRGISMLNKAREEHRIPERSTSIVIMLTDGDANVGESRPEKIQENVRNAIGGKFPLYNLGFGNNLNYNFLENMALENHGFARRIYEDSDADLQLQGFYEEVANPLLTGVEMEYPENAILDLTQNTYQHFYDGSEIVVAGRLVDEDMNSFKADVKGHGATNDLTFTEEVDMKEMEKALQERDYIFGNYIERLWAYLTIEQLLEKRKNAHGEEKENLTARALDLSLKYHFVTPLTSMVVTKPEDNEDERAIADKPGEDAEATPVSPAMSYLTSYQPPQNPYYYVDGDPHFIIQIPEKDDALCFNIDEAPGTVLRLIQDAVTGLTVNGQITGDKRGSPDSKTRKTYFGKLGIANAQMDFQVEVTTEKITLWNRAVPSTFSWLDTVTVTQDGLSMMINRKNMVVSFGDGVTFVVVLHQVWKKHPVHRDFLGFYVVDSHRMSAQTHGLLGQFFQPFDFKVSDIRPGSDPTKPDATLVVKNHQLIVTRGSQKDYRKDASIGTKVVCWFVHNNGEGLIDGVHTDYIVPNLF

SEQ ID NO: 139 - protein, 312 aa, Homo sapiens
MAKVFSFILVTTALTMGREISALEDCAQEQMRLRAQVRLLETRVKQQQVKIKQLLQENEVQFLDKGDENTVIDLGSKRQYADCSEIFNDGYKLSGFYKIKPLQSPAEFSVYCDMSDGGGWTVIQRRSDGSENFNRGWKDYENGFGNFVQKHGEYWLGNKNLHFLTTQEDYTLKIDLADFEKNSRYAQYKNFKVGDEKNFYELNIGEYSGTAGDSLAGNFHPEVQWWASHQRMKFSTWDRDHDNYEGNCAEEDQSGWWFNRCHSANLNGVYYSGPYTAKTDNGIVWYTWHGWWYSLKSVVMKIRPNDFIPNVI

SEQ ID NO: 140 - protein, 211 aa, Homo sapiens
MISRMEKMTMMMKILIMFALGMNYWSCSGFPVYDYDPSSLRDALSASVVKVNSQSLSPYLFRAFRSSLKRVEVLDENNLVMNLEFSIRETTCRKDSGEDPATCAFQRDYYVSTAVCRSTVKVSAQQVQGVHARCSWSSSTSESYSSEEMIFGDMLGSHKWRNNYLFGLISDESISEQFYDRSLGIMRRVLPPGNRRYPNHRHRARINTDFE

SEQ ID NO: 141 - protein, 863 aa, Homo sapiens
MARRSSFQSCQIISLFTFAVGVNICLGFTAHRIKRAEGWEEGPPTVLSDSPWTNISGSCKGRCFELQEAGPPDCRCDNLCKSYTSCCHDFDELCLKTARGWECTKDRCGEVRNEENACHCSEDCLARGDCCTNYQVVCKGESHWVDDDCEEIKAAECPAGFVRPPLIIFSVDGFRASYMKKGSKVMPNIEKLRSCGTHSPYMRPVYPTKTFPNLYTLATGLYPESHGIVGNSMYDPVFDATFHLRGREKFNHRWWGGQPLWITATKQGVKAGTFFWSVVIPHERRILTILQWLTLPDHERPSVYAFYSEQPDFSGHKYGPFGPEMTNPLREIDKIVGQLMDGLKQLKLHRCVNVIFVGDHGMEDVTCDRTEFLSNYLTNVDDITLVPGTLGRIRSKFSNNAKYDPKAIIANLTCKKPDQHFKPYLKQHLPKRLHYANNRRIEDIHLLVERRWHVARKPLDVYKKPSGKCFFQGDHGFDNKVNSMQTVFVGYGSTFKYKTKVPPFENIELYNVMCDLLGLKPAPNNGTHGSLNHLLRTNTFRPTMPEEVTRPNYPGIMYLQSDFDLGCTCDDKVEPKNKLDELNKRLHTKGSTEERHLLYGRPAVLYRTRYDILYHTDFESGYSEIFLMPLWTSYTVSKQAEVSSVPDHLTSCVRPDVRVSPSFSQNCLAYKNDKQMSYGFLFPPYLSSSPEAKYDAFLVTNMVPMYPAFKRVWNYFQRVLVKKYASERNGVNVISGPIFDYDYDGLHDTEDKIKQYVEGSSIPVPTHYYSIITSCLDFTQPADKCDGPLSVSSFILPHRPDNEESCNSSEDESKWVEELMKMHTARVRDIEHLTSLDFFRKTSRSYPEILTLKTYLHTYESEI

SEQ ID NO: 142 - protein, 1118 aa, Homo sapiens
MARSPGRAYALLLLLICFNVGSGLHLQVLSTRNENKLLPKHPHLVRQKRAWITAPVALREGEDLSKKNPIAKIHSDLAEERGLKITYKYTGKGITEPPFGIFVFNKDTGELNVTSILDREETPFFLLTGYALDARGNNVEKPLELRIKVLDINDNEPVFTQDVFVGSVEELSAAHTLVMKINATDADEPNTLNSKISYRIVSLEPAYPPVFYLNKDTGEIYTTSVTLDREEHSSYTLTVEARDGNGEVTDKPVKQAQVQIRILDVNDNIPVVENKVLEGMVEENQVNVEVTRIKVFDADEIGSDNWLANFTFASGNEGGYFHIETDAQTNEGIVTLIKEVDYEEMKNLDFSVIVANKAAFHKSIRSKYKPTPIPIKVKVKNVKEGIHFKSSVISIYVSESMDRSSKGQIIGNFQAFDEDTGLPAHARYVKLEDRDNWISVDSVTSEIKLAKLPDFESRYVQNGTYTVKIVAISEDYPRKTITGTVLINVEDINDNCPTLIEPVQTICHDAEYVNVTAEDLDGHPNSGPFSFSVIDKPPGMAEKWKIARQESTSVLLQQSEKKLGRSEIQFLISDNQGFSCPEKQVLTLTVCECLHGSGCREAQHDSYVGLGPAAIALMILAFLLLLLVPLLLLMCHCGKGAKGFTPIPGTIEMLHPWNNEGAPPEDKVVPSFLPVDQGGSLVGRNGVGGMAKEATMKGSSSASIVKGQHEMSEMDGRWEEHRSLLSGRATQFTGATGAIMTTETTKTARATGASRDMAGAQAAAVALNEEFLRNYFTDKAASYTEEDENHTAKDCLLVYSQEETESLNASIGCCSFIEGELDDRFLDDLGLKFKTLAEVCLGQKIDINKEIEQRQKPATETSMNTASHSLCEQTMVNSENTYSSGSSFPVPKSLQEANAEKVTQEIVTERSVSSRQAQKVATPLPDPMASRNVIATETSYVTGSTMPPTTVILGPSQPQSLIVTERVYAPASTLVDQPYANEGTVVVTERVIQPHGGGSNPLEGTQHLQDVPYVMVRERESFLAPSSGVQPTLAMPNIAVGQNVTVTERVLAPASTLQSSYQIPTENSMTARNTTVSGAGVPGPLPDFGLEESGHSNSTITTSSTRVTKHSTVQHSYS

SEQ ID NO: 143 - protein, 560 aa, Homo sapiens
MFARMSDLHVLLLMALVGKTACGFSLMSLLESLDPDWTPDQYDYSYEDYNQEENTSSTLTHAENPDWYYTEDQADPCQPNPCEHGGDCLVHGSTFTCSCLAPFSGNKCQKVQNTCKDNPCGRGQCLITQSPPYYRCVCKHPYTGPSCSQVVPVCRPNPCQNGATCSRHKRRSKFTCACPDQFKGKFCEIGSDDCYVGDGYSYRGKMNRTVNQHACLYWNSHLLLQENYNMFMEDAETHGIGEHNFCRNPDADEKPWCFIKVTNDKVKWEYCDVSACSAQDVAYPEESPTEPSTKLPGFDSCGKTEIAERKIKRIYGGFKSTAGKHPWQASLQSSLPLTISMPQGHFCGGALIHPCWVLTAAHCTDIKTRHLKVVLGDQDLKKEEFHEQSFRVEKIFKYSHYNERDEIPHNDIALLKLKPVDGHCALESKYVKTVCLPDGSFPSGSECHISGWGVTETGKGSRQLLDAKVKLIANTLCNSRQLYDHMIDDSMICAGNLQKPGQDTCQGDSGGPLTCEKDGTYYVYGIVSWGLECGKRPGVYTQVTKFLNWIKATIKSESGF

SEQ ID NO: 144 - protein, 930 aa, Homo sapiens
MKPPRPVRTCSKVLVLLSLLAIHQTTTAEKNGIDIYSLTVDSRVSSRFAHTVVTSRVVNRANTVQEATFQMELPKKAFITNFSMIIDGMTYPGIIKEKAEAQAQYSAAVAKGKSAGLVKATGRNMEQFQVSVSVAPNAKITFELVYEELLKRRLGVYELLLKVRPQQLVKHLQMDIHIFEPQGISFLETESTFMTNQLVDALTTWQNKTKAHIRFKPTLSQQQKSPEQQETVLDGNLIIRYDVDRAISGGSIQIENGYFVHYFAPEGLTTMPKNVVFVIDKSGSMSGRKIQQTREALIKILDDLSPRDQFNLIVFSTEATQWRPSLVPASAENVNKARSFAAGIQALGGTNINDAMLMAVQLLDSSNQEERLPEGSVSLIILLTDGDPTVGETNPRSIQNNVREAVSGRYSLFCLGFGFDVSYAFLEKLALDNGGLARRIHEDSDSALQLQDFYQEVANPLLTAVTFEYPSNAVEEVTQNNFRLLFKGSEMVVAGKLQDRGPDVLTATVSGKLPTQNITFQTESSVAEQEAEFQSPKYIFHNFMERLWAYLTIQQLLEQTVSASDADQQALRNQALNLSLAYSFVTPLTSMVVTKPDDQEQSQVAEKPMEGESRNRNVHSGSTFFKYYLQGAKIPKPEASFSPRRGWNRQAGAAGSRMNFRPGVLSSRQLGLPGPPDVPDHAAYHPFRRLAILPASAPPATSNPDPAVSRVMNMKIEETTMTTQTPAPIQAPSAILPLPGQSVERLCVDPRHRQGPVNLLSDPEQGVEVTGQYEREKAGFSWIEVTFKNPLVWVHASPEHVVVTRNRRSSAYKWKETLFSVMPGLKMTMDKTGLLLLSDPDKVTIGLLFWDGRGEGLRLLLRDTDRFSSHVGGTLGQFYQEVLWGSPAASDDGRRTLRVQGNDHSATRERRLDYQEGPPGVEISCWSVEL

SEQ ID NO: 145 - protein, 449 aa, Homo sapiens
MLPAATASLLGPLLTACALLPFAQGQTPNYTRPVFLCGGDVKGESGYVASEGFPNLYPPNKECIWTITVPEGQTVSLSFRVFDLELHPACRYDALEVFAGSGTSGQRLGRFCGTFRPAPLVAPGNQVTLRMTTDEGTGGRGFLLWYSGRATSGTEHQFCGGRLEKAQGTLTTPNWPESDYPPGISCSWHIIAPPDQVIALTFEKFDLEPDTYCRYDSVSVFNGAVSDDSRRLGKFCGDAVPGSISSEGNELLVQFVSDLSVTADGFSASYKTLPRGTAKEGQGPGPKRGTEPKVKLPPKSQPPEKTEESPSAPDAPTCPKQCRRTGTLQSNFCASSLVVTATVKSMVREPGEGLAVTVSLIGAYKTGGLDLPSPPTGASLKFYVPCKQCPPMKKGVSYLLMGQVEENRGPVLPPESFVVLHRPNQDQILTNLSKRKCPSQPVRAAASQD

SEQ ID NO: 146 - protein, 683 aa, Homo sapiens
MALFVRLLALALALALGPAATLAGPAKSPYQLVLQHSRLRGRQHGPNVCAVQKVIGTNRKYFTNCKQWYQRKICGKSTVISYECCPGYEKVPGEKGCPAALPLSNLYETLGVVGSTTTQLYTDRTEKLRPEMEGPGSFTIFAPSNEAWASLPAEVLDSLVSNVNIELLNALRYHMVGRRVLTDELKHGMTLTSMYQNSNIQIHHYPNGIVTVNCARLLKADHHATNGVVHLIDKVISTITNNIQQIIEIEDTFETLRAAVAASGLNTMLEGNGQYTLLAPTNEAFEKIPSETLNRILGDPEALRDLLNNHILKSAMCAEAIVAGLSVETLEGTTLEVGCSGDMLTINGKAIISNKDILATNGVIHYIDELLIPDSAKTLFELAAESDVSTAIDLFRQAGLGNHLSGSERLTLLAPLNSVFKDGTPPIDAHTRNLLRNHIIKDQLASKYLYHGQTLETLGGKKLRVFVYRNSLCIENSCIAAHDKRGRYGTLFTMDRVLTPPMGTVMDVLKGDNRFSMLVAAIQSAGLTETLNREGVYTVFAPTNEAFRALPPRERSRLLGDAKELANILKYHIGDEILVSGGIGALVRLKSLQGDKLEVSLKNNVVSVNKEPVAEPDIMATNGVVHVITNVLQPPANRPQERGDELADSALEIFKQASAFSRASQRSVRLAPVYQKLLERMKH

SEQ ID NO: 147 - protein, 282 aa, Homo sapiens
MERPSLRALLLGAAGLLLLLLPLSSSSSSDTCGPCEPASCPPLPPLGCLLGETRDACGCCPMCARGEGEPCGGGGAGRGYCAPGMECVKSRKRRKGKAGAAAGGPGVSGVCVCKSRYPVCGSDGTTYPSGCQLRAASQRAESRGEKAITQVSKGTCEQGPSIVTPPKDIWNVTGAQVYLSCEVIGIPTPVLIWNKVKRGHYGVQRTELLPGDRDNLAIQTRGGPEKHEVTGWVLVSPLSKEDAGEYECHASNSQGQASASAKITVVDALHEIPVKKGEGAEL

SEQ ID NO: 148 - protein, 746 aa, Homo sapiens
MQAKKRYFILLSAGSCLALLFYFGGLQFRASRSHSRREEHSGRNGLHHPSPDHFWPRFPDALRPFVPWDQLENEDSSVHISPRQKRDANSSIYKGKKCRMESCFDFTLCKKNGFKVYVYPQQKGEKIAESYQNILAAIEGSRFYTSDPSQACLFVLSLDTLDRDQLSPQYVHNLRSKVQSLHLWNNGRNHLIFNLYSGTWPDYTEDVGFDIGQAMLAKASISTENFRPNFDVSIPLFSKDHPRTGGERGFLKFNTIPPLRKYMLVFKGKRYLTGIGSDTRNALYHVHNGEDVVLLTTCKHGKDWQKHKDSRCDRDNTEYEKYDYREMLHNATFCLVPRGRRLGSFRFLEALQAACVPVMLSNGWELPFSEVINWNQAAVIGDERLLLQIPSTIRSIHQDKILALRQQTQFLWEAYFSSVEKIVLTTLEIIQDRIFKHISRNSLIWNKHPGGLFVLPQYSSYLGDFPYYYANLGLKPPSKFTAVIHAVTPLVSQSQPVLKLLVAAAKSQYCAQIIVLWNCDKPLPAKHRWPATAVPVVVIEGESKVMSSRFLPYDNIITDAVLSLDEDTVLSTTEVDFAFTVWQSFPERIVGYPARSHFWDNSKERWGYTSKWTNDYSMVLTGAAIYHKYYHYLYSHYLPASLKNMVDQLANCEDILMNFLVSAVTKLPPIKVTQKKQYKETMMGQTSRASRWADPDHFAQRQSCMNTFASWFGYMPLIHSQMRLDPVLFKDQVSILRKKYRDIERL

SEQ ID NO: 149 - protein, 540 aa, Homo sapiens
MGTTARAALVLTYLAVASAASEGGFTATGQRQLRPEHFQEVGYAAPPSPPLSRSLPMDHPDSSQHGPPFEGQSQVQPPPSQEATPLQQEKLLPAQLPAEKEVGPPLPQEAVPLQKELPSLQHPNEQKEGTPAPFGDQSHPEPESWNAAQHCQQDRSQGGWGHRLDGFPPGRPSPDNLNQICLPNRQHVVYGPWNLPQSSYSHLTRQGETLNFLEIGYSRCCHCRSHTNRLECAKLVWEEAMSRFCEAEFSVKTRPHWCCTRQGEARFSCFQEEAPQPHYQLRACPSHQPDISSGLELPFPPGVPTLDNIKNICHLRRFRSVPRNLPATDPLQRELLALIQLEREFQRCCRQGNNHTCTWKAWEDTLDKYCDREYAVKTHHHLCCRHPPSPTRDECFARRAPYPNYDRDILTIDIGRVTPNLMGHLCGNQRVLTKHKHIPGLIHNMTARCCDLPFPEQACCAEEEKLTFINDLCGPRRNIWRDPALCCYLSPGDEQVNCFNINYLRNVALVSGDTENAKGQGEQGSTGGTNISSTSEPKEE

SEQ ID NO: 150 - protein, 535 aa, Homo sapiens
MRSSVSRQTYSTKGGFSSNSASGGSGSQARTSFSSVTVSRSSGSGGGAHCGPGTGGFGSRSLYNLGGHKSISVSVAGGALLGRALGGFGFGSRAFMGQGAGRQTFGPACPPGGIQEVTVNQSLLTPLHVEIDPEIQRVRTQEREQIKTLNNKFASFIDKVRFLEQQNKVLETKWALLQEQGQNLGVTRNNLEPLFEAYLGSMRSTLDRLQSERGRLDSELRNVQDLVEDFKNKYEDEINKHTAAENEFVVLKKDVDAAYMGRMDLHGKVGTLTQEIDFLQQLYEMELSQVQTHVSNTNVVLSMDNNRNLDLDSIIAEVKAQYELIAQRSRAEAEAWYQTKYEELQVTAGKHGDNLRDTKNEIAELTRTIQRLQGEADAAKKQCQQLQTAIAEAEQRGELALKDAQKKLGDLDVALHQAKEDLTRLLRDYQELMNVKLALDVEIATYRKLLESEESRMSGECPSAVSISVTGNSTTVCGGGAASFGGGISLGGSGGATKGGFSTNVGYSTVKGGPVSAGTSILRKTTTVKTSSQRY

SEQ ID NO: 151 - protein, 673 aa, Homo sapiens
MCSRVPLLLPLLLLLALGPGVQGCPSGCQCSQPQTVFCTARQGTTVPRDVPPDTVGLYVFENGITMLDAGSFAGLPGLQLLDLSQNQIASLPSGVFQPLANLSNLDLTANRLHEITNETFRGLRRLERLYLGKNRIRHIQPGAFDTLDRLLELKLQDNELRALPPLRLPRLLLLDLSHNSLLALEPGILDTANVEALRLAGLGLQQLDEGLFSRLRNLHDLDVSDNQLERVPPVIRGLRGLTRLRLAGNTRIAQLRPEDLAGLAALQELDVSNLSLQALPGDLSGLFPRLRLLAAARNPFNCVCPLSWFGPWVRESHVTLASPEETRCHFPPKNAGRLLLELDYADFGCPATTTTATVPTTRPVVREPTALSSSLAPTWLSPTEPATEAPSPPSTAPPTVGPVPQPQDCPPSTCLNGGTCHLGTRHHLACLCPEGFTGLYCESQMGQGTRPSPTPVTPRPPRSLTLGIEPVSPTSLRVGLQRYLQGSSVQLRSLRLTYRNLSGPDKRLVTLRLPASLAEYTVTQLRPNATYSVCVMPLGPGRVPEGEEACGEAHTPPAVHSNHAPVTQAREGNLPLLIAPALAAVLLAALAAVGAAYCVRRGRAMAAAAQDKGQVGPGAGPLELEGVKVPLEPGPKATEGGGEALPSGSECEVPLMGFPGPGLQSPLHAKPYI

SEQ ID NO: 152 - protein, 2335 aa, Homo sapiens
MAGVFPYRGPGNPVPGPLAPLPDYMSEEKLQEKARKWQQLQAKRYAEKRKFGFVDAQKEDMPPEHVRKIIRDHGDMTNRKFRHDKRVYLGALKYMPHAVLKLLENMPMPWEQIRDVPVLYHITGAISFVNEIPWVIEPVYISQWGSMWIMMRREKRDRRHFKRMRFPPFDDEEPPLDYADNILDVEPLEAIQLELDPEEDAPVLDWFYDHQPLRDSRKYVNGSTYQRWQFTLPMMSTLYRLANQLLTDLVDDNYFYLFDLKAFFTSKALNMAIPGGPKFEPLVRDINLQDEDWNEFNDINKIIIRQPIRTEYKIAFPYLYNNLPHHVHLTWYHTPNVVFIKTEDPDLPAFYFDPLINPISHRHSVKSQEPLPDDDEEFELPEFVEPFLKDTPLYTDNTANGIALLWAPRPFNLRSGRTRRALDIPLVKNWYREHCPAGQPVKVRVSYQKLLKYYVLNALKHRPPKAQKKRYLFRSFKATKFFQSTKLDWVEVGLQVCRQGYNMLNLLIHRKNLNYLHLDYNFNLKPVKTLTTKERKKSRFGNAFHLCREVLRLTKLVVDSHVQYRLGNVDAFQLADGLQYIFAHVGQLTGMYRYKYKLMRQIRMCKDLKHLIYYRFNTGPVGKGPGCGFWAAGWRVWLFFMRGITPLLERWLGNLLARQFEGRHSKGVAKTVTKQRVESHFDLELRAAVMHDILDMMPEGIKQNKARTILQHLSEAWRCWKANIPWKVPGLPTPIENMILRYVKAKADWWTNTAHYNRERIRRGATVDKTVCKKNLGRLTRLYLKAEQERQHNYLKDGPYITAEEAVAVYTTTVHWLESRRFSPIPFPPLSYKHDTKLLILALERLKEAYSVKSRLNQSQREELGLIEQAYDNPHEALSRIKRHLLTQRAFKEVGIEFMDLYSHLVPVYDVEPLEKITDAYLDQYLWYEADKRRLFPPWIKPADTEPPPLLVYKWCQGINNLQDVWETSEGECNVMLESRFEKMYEKIDLTLLNRLLRLIVDHNIADYMTAKNNVVINYKDMNHTNSYGIIRGLQFASFIVQYYGLVMDLLVLGLHRASEMAGPPQMPNDFLSFQDIATEAAHPIRLFCRYIDRIHIFFRFTADEARDLIQRYLTEHPDPNNENIVGYNNKKCWPRDARMRLMKHDVNLGRAVFWDIKNRLPRSVTTVQWENSFVSVYSKDNPNLLFNMCGFECRILPKCRTSYEEFTHKDGVWNLQNEVTKERTAQCFLRVDDESMQRFHNRVRQILMASGSTTFTKIVNKWNTALIGLMTYFREAVVNTQELLDLLVKCENKIQTRIKIGLNSKMPSRFPPVVFYTPKELGGLGMLSMGHVLIPQSDLRWSKQTDVGITHFRSGMSHEEDQLIPNLYRYIQPWESEFIDSQRVWAEYALKRQEAIAQNRRLTLEDLEDSWDRGIPRINTLFQKDRHTLAYDKGWRVRTDFKQYQVLKQNPFWWTHQRHDGKLWNLNNYRTDMIQALGGVEGILEHTLFKGTYFPTWEGLFWEKASGFEESMKWKKLTNAQRSGLNQIPNRRFTLWWSPTINRANVYVGFQVQLDLTGIFMHGKIPTLKISLIQIFRAHLWQKIHESIVMDLCQVFDQELDALEIETVQKETIHPRKSYKMNSSCADILLFASYKWNVSRPSLLADSKDVMDSTTTQKYWIDIQLRWGDYDSHDIERYARAKFLDYTTDNMSIYPSPTGVLIAIDLAYNLHSAYGNWFPGSKPLIQQAMAKIMKANPALYVLRERIRKGLQLYSSEPTEPYLSSQNYGELFSNQIIWFVDDTNVYRVTIHKTFEGNLTTKPINGAIFIFNPRTGQLFLKIIHTSVWAGQKRLGQLAKWKTAEEVAALIRSLPVEEQPKQIIVTRKGMLDPLEVHLLDFPNIVIKGSELQLPFQACLKVEKFGDLILKATEPQMVLFNLYDDWLKTISSYTAFSRLILILRALHVNNDRAKVILKPDKTTITEPHHIWPTLTDEEWIKVEVQLKDLILADYGKKNNVNVASLTQSEIRDIILGMEISAPSQQRQQIAEIEKQTKEQSQLTATQTRTVNKHGDEIITSTTSNYETQTFSSKTEWRVRAISAANLHLRTNHIYVSSDDIKETGYTYILPKNVLKKFICISDLRAQIAGYLYGVSPPDNPQVKEIRCIVMVPQWGTHQTVHLPGQLPQHEYLKEMEPLGWIHTQPNESPQLSPQDVTTHAKIMADNPSWDGEKTIIITCSFTPGSCTLTAYKLTPSGYEWGRQNTDKGNNPKGYLPSHYERVQMLLSDRFLGFFMVPAQSSWNYNFMGVRHDPNMKYELQLANPKEFYHEVHRPSHFLNFALLQEGEVYSADREDLYA

SEQ ID NO: 153 - protein, 1427 aa, Homo sapiens
MHQRHPRARCPPLCVAGILACGFLLGCWGPSHFQQSCLQALEPQAVSSYLSPGAPLKGRPPSPGFQRQRQRQRRAAGGILHLELLVAVGPDVFQAHQEDTERYVLTNLNIGAELLRDPSLGAQFRVHLVKMVILTEPEGAPNITANLTSSLLSVCGWSQTINPEDDTDPGHADLVLYITRFDLELPDGNRQVRGVTQLGGACSPTWSCLITEDTGFDLGVTIAHEIGHSFGLEHDGAPGSGCGPSGHVMASDGAAPRAGLAWSPCSRRQLLSLLSAGRARCVWDPPRPQPGSAGHPPDAQPGLYYSANEQCRVAFGPKAVACTFAREHLDMCQALSCHTDPLDQSSCSRLLVPLLDGTECGVEKWCSKGRCRSLVELTPIAAVHGRWSSWGPRSPCSRSCGGGVVTRRRQCNNPRPAFGGRACVGADLQAEMCNTQACEKTQLEFMSQQCARTDGQPLRSSPGGASFYHWGAAVPHSQGDALCRHMCRAIGESFIMKRGDSFLDGTRCMPSGPREDGTLSLCVSGSCRTFGCDGRMDSQQVWDRCQVCGGDNSTCSPRKGSFTAGRAREYVTFLTVTPNLTSVYIANHRPLFTHLAVRIGGRYVVAGKMSISPNTTYPSLLEDGRVEYRVALTEDRLPRLEEIRIWGPLQEDADIQVYRRYGEEYGNLTRPDITFTYFQPKPRQAWVWAAVRGPCSVSCGAGLRWVNYSCLDQARKELVETVQCQGSQQPPAWPEACVLEPCPPYWAVGDFGPCSASCGGGLRERPVRCVEAQGSLLKTLPPARCRAGAQQPAVALETCNPQPCPARWEVSEPSSCTSAGGAGLALENETCVPGADGLEAPVTEGPGSVDEKLPAPEPCVGMSCPPGWGHLDATSAGEKAPSPWGSIRTGAQAAHVWTPAAGSCSVSCGRGLMELRFLCMDSALRVPVQEELCGLASKPGSRREVCQAVPCPARWQYKLAACSVSCGRGVVRRILYCARAHGEDDGEEILLDTQCQGLPRPEPQEACSLEPCPPRWKVMSLGPCSASCGLGTARRSVACVQLDQGQDVEVDEAACAALVRPEASVPCLIADCTYRWHVGTWMECSVSCGDGIQRRRDTCLGPQAQAPVPADFCQHLPKPVTVRGCWAGPCVGQGTPSLVPHEEAAAPGRTTATPAGASLEWSQARGLLFSPAPQPRRLLPGPQENSVQSSACGRQHLEPTGTIDMRGPGQADCAVAIGRPLGEVVTLRVLESSLNCSAGDMLLLWGRLTWRKMCRKLLDMTFSSKTNTLVVRQRCGRPGGGVLLRYGSQLAPETFYRECDMQLFGPWGEIVSPSLSPATSNAGGCRLFINVAPHARIAIHALATNMGAGTEGANASYILIRDTHSLRTTAFHGQQVLYWESESSQAEMEFSEGFLKAQASLRGQYWTLQSWVPEMQDPQSWKGKEGT

SEQ ID NO: 154 - protein, 529 aa, Homo sapiens
MSRQLNIKSSGDKGNFSVHSAVVPRKAVGSLASYCAAGRGAGAGFGSRSLYSLGGNRRISFNVAGGGVRAGGYGFRPGSGYGGGRASGFAGSMFGSVALGPACLSVCPPGGIHQVTVNKSLLAPLNVELDPEIQKVRAQEREQIKVLNDKFASFIDKVRFLEQQNQVLETKWELLQQLDLNNCKKNLEPILEGYISNLRKQLETLSGDRVRLDSELRSMRDLVEDYKKRYEVEINRRTTAENEFVVLKKDADAAYAVKVELQAKVDSLDKEIKFLKCLYDAEIAQIQTHASETSVILSMDNNRDLDLDSIIAEVRMHYEEIALKSKAEAEALYQTKIQELQLAASRHGDDLKHTRSEMVELNRLIQRIRCEIGNVKKQRASLETAIADAEQRGDNALKDAQAKLDELEGALHQAKEELARMLREYQELMSLKLALDMEIATYRKLLEGEECRMSGENPSSVSISVISSSSYSYHHPSSAGVDLGASAVAGSSGSTQSGQTKTTEARGGDLKDTQGKSTPASIPARKATR

SEQ ID NO: 155 - protein, 578 aa, Homo sapiens
MSHQFSSQSAFSSMSRRVYSTSSSAGSGGGSPAVGSVCYARGRCGGGGYGIHGRGFGSRSLYNLGGSRSISINLMGRSTSGFCQGGGVGGFGGGRGFGVGSTGAGGFGGGGFGGAGFGTSNFGLGGFGPYCPPGGIQEVTINQSLLEPLHLEVDPEIQRIKTQEREQIMVLNNKFASFIDKVRFLEQQNQVLQTKWELLQQVNTSTGTNNLEPLLENYIGDLRRQVDLLSAEQMRQNAEVRSMQDVVEDYKSKYEDEINKRTGSENDFVVLKKDVDAAYVSKVDLESRVDTLTGEVNFLKYLFLTELSQVQTHISDTNVILSMDNNRSLDLDSIIDAVRTQYELIAQRSKDEAEALYQTKYQELQITAGRHGDDLKNSKMEIAELNRTVQRLQAEISNVKKQIEQMQSLISDAEERGEQALQDAWQKLQDLEEALQQSKEELARLLRDYQAMLGVKLSLDVEIATYRQLLEGEESRMSGELQSHVSISVQNSQVSVNGGAGGGGSYGSGGYGGGSGGGYGGGRSYRGGGARGRSGGGYGSGCGGGGGSYGGSGRSGRGSSRVQIIQTSTNTSHRRILE

SEQ ID NO: 156 - protein, 422 aa, Homo sapiens
MGPAWLWLLGTGILASVHCQPLLAHGDKSLQGPQPPRHQLSEPAPAYHRITPTITNFALRLYKELAADAPGNIFFSPVSISTTLALLSLGAQANTSALILEGLGFNLTETPEADIHQGFRSLLHTLALPSPKLELKVGNSLFLDKRLKPRQHYLDSIKELYGAFAFSANFTDSVTTGRQINDYLRRQTYGQVVDCLPEFSQDTFMVLANYIFFKAKWKHPFSRYQTQKQESFFVDERTSLQVPMMHQKEMHRFLYDQDLACTVLQIEYRGNALALLVLPDPGKMKQVEAALQPQTLRKWGQLLLPSLLDLHLPRFSISGTYNLEDILPQIGLTNILNLEADFSGVTGQLNKTISKVSHKAMVDMSEKGTEAGAASGLLSQPPSLNTMSDPHAHFNRPFLLLLWEVTTQSLLFLGKVVNPVAG

SEQ ID NO: 157 - protein, 273 aa, Homo sapiens
MRLPGVPLARPALLLLLPLLAPLLGTGAPAELRVRVRLPDGQVTEESLQADSDADSISLELRKPDGTLVSFTADFKKDVKVFRALILGELEKGQSQFQALCFVTQLQHNEIIPSEAMAKLRQKNPRAVRQAEEVRGLEHLHMDVAVNFSQGALLSPHLHNVCAEAVDAIYTRQEDVRFWLEQGVDSSVFEALPKASEQAELPRCRQVGDHGKPCVCRYGLSLAWYPCMLKYCHSRDRPTPYKCGIRSCQKSYSFDFYVPQRQLCLWDEDPYPG

SEQ ID NO: 158 - protein, 417 aa, Homo sapiens
MASYLYGVLFAVGLCAPIYCVSPANAPSAYPRPSSTKSTPASQVYSLNTDFAFRLYRRLVLETPSQNIFFSPVSVSTSLAMLSLGAHSVTKTQILQGLGFNLTHTPESAIHQGFQHLVHSLTVPSKDLTLKMGSALFVKKELQLQANFLGNVKRLYEAEVFSTDFSNPSIAQARINSHVKKKTQGKVVDIIQGLDLLTAMVLVNHIFFKAKWEKPFHPEYTRKNFPFLVGEQVTVHVPMMHQKEQFAFGVDTELNCFVLQMDYKGDAVAFFVLPSKGKMRQLEQALSARTLRKWSHSLQKRWIEVFIPRFSISASYNLETILPKMGIQNVFDKNADFSGIAKRDSLQVSKATHKAVLDVSEEGTEATAATTTKFIVRSKDGPSYFTVSFNRTFLMMITNKATDGILFLGKVENPTKS

SEQ ID NO: 159 - protein, 692 aa, Homo sapiens
MGTVSSRRSWWPLPLLLLLLLLLGPAGARAQEDEDGDYEELVLALRSEEDGLAEAPEHGTTATFHRCAKDPWRLPGTYVVVLKEETHLSQSERTARRLQAQAARRGYLTKILHVFHGLLPGFLVKMSGDLLELALKLPHVDYIEEDSSVFAQSIPWNLERITPPRYRADEYQPPDGGSLVEVYLLDTSIQSDHREIEGRVMVTDFENVPEEDGTRFHRQASKCDSHGTHLAGVVSGRDAGVAKGASMRSLRVLNCQGKGTVSGTLIGLEFIRKSQLVQPVGPLVVLLPLAGGYSRVLNAACQRLARAGVVLVTAAGNFRDDACLYSPASAPEVITVGATNAQDQPVTLGTLGTNFGRCVDLFAPGEDIIGASSDCSTCFVSQSGTSQAAAHVAGIAAMMLSAEPELTLAELRQRLIHFSAKDVINEAWFPEDQRVLTPNLVAALPPSTHGAGWQLFCRTVWSAHSGPTRMATAVARCAPDEELLSCSSFSRSGKRRGERMEAQGGKLVCRAHNAFGGEGVYAIARCCLLPQANCSVHTAPPAEASMGTRVHCHQQGHVLTGCSSHWEVEDLGTHKPPVLRPRGQPNQCVGHREASIHASCCHAPGLECKVKEHGIPAPQEQVTVACEEGWTLTGCSALPGTSHVLGAYAVDNTCVVRSRDVSTTGSTSEGAVTAVAICCRSRHLAQASQELQ

SEQ ID NO: 160 - protein, 1404 aa, Homo sapiens
MAWKTLPIYLLLLLSVFVIQQVSSQDLSSCAGRCGEGYSRDATCNCDYNCQHYMECCPDFKRVCTAELSCKGRCFESFERGRECDCDAQCKKYDKCCPDYESFCAEVHNPTSPPSSKKAPPPSGASQTIKSTTKRSPKPPNKKKTKKVIESEEITEEHSVSENQESSSSSSSSSSSSTIRKIKSSKNSAANRELQKKLKVKDNKKNRTKKKPTPKPPVVDEAGSGLDNGDFKVTTPDTSTTQHNKVSTSPKITTAKPINPRPSLPPNSDTSKETSLTVNKETTVETKETTTTNKQTSTDGKEKTTSAKETQSIEKTSAKDLAPTSKVLAKPTPKAETTTKGPALTTPKEPTPTTPKEPASTTPKEPTPTTIKSAPTTPKEPAPTTTKSAPTTPKEPAPTTTKEPAPTTPKEPAPTTTKEPAPTTTKSAPTTPKEPAPTTPKKPAPTTPKEPAPTTPKEPTPTTPKEPAPTTKEPAPTTPKEPAPTAPKKPAPTTPKEPAPTTPKEPAPTTTKEPSPTTPKEPAPTTTKSAPTTTKEPAPTTTKSAPTTPKEPSPTTTKEPAPTTPKEPAPTTPKKPAPTTPKEPAPTTPKEPAPTTTKKPAPTTPKEPAPTTPKETAPTTPKKLTPTTPEKLAPTTPEKPAPTTPEELAPTTPEEPTPTTPEEPAPTTPKAAAPNTPKEPAPTTPKEPAPTTPKEPAPTTPKETAPTTPKGTAPTTLKEPAPTTPKKPAPKELAPTTTKEPTSTTSDKPAPTTPKGTAPTTPKEPAPTTPKEPAPTTPKGTAPTTLKEPAPTTPKKPAPKELAPTTTKGPTSTTSDKPAPTTPKETAPTTPKEPAPTTPKKPAPTTPETPPPTTSEVSTPTTTKEPTTIHKSPDESTPELSAEPTPKALENSPKEPGVPTTKTPAATKPEMTTTAKDKTTERDLRTTPETTTAAPKMTKETATTTEKTTESKITATTTQVTSTTTQDTTPFKITTLKTTTLAPKVTTTKKTITTTEIMNKPEETAKPKDRATNSKATTPKPQKPTKAPKKPTSTKKPKTMPRVRKPKTTPTPRKMTSTMPELNPTSRIAEAMLQTTTRPNQTPNSKLVEVNPKSEDAGGAEGETPHMLLRPHVFMPEVTPDMDYLPRVPNQGIIINPMLSDETNICNGKPVDGLTTLRNGTLVAFRGHYFWMLSPFSPPSPARRITEVWGIPSPIDTVFTRCNCEGKTFFFKDSQYWRFTNDIKDAGYPKPIFKGFGGLTGQIVAALSTAKYKNWPESVYFFKRGGSIQQYIYKQEPVQKCPGRRPALNYPVYGETTQVRRRRFERAIGPSQTHTIRIQYSPARLAYQDKGVLHNEVKVSILWRGLPNVVTSAISLPNIRKPDGYDYYAFSKDQYYNIDVPSRTARAITTRSGQTLSKVWYNCP

SEQ ID NO: 161 - protein, 406 aa, Homo sapiens
MPPVGGKKAKKGILERLNAGEIVIGDGGFVFALEKRGYVKAGPWTPEAAVEHPEAVRQLHREFLRAGSNVMQTFTFYASEDKLENRGNYVLEKISGQEVNEAACDIARQVADEGDALVAGGVSQTPSYLSCKSETEVKKVFLQQLEVFMKKNVDFLIAEYFEHVEEAVWAVETLIASGKPVAATMCIGPEGDLHGVPPGECAVRLVKAGASIIGVNCHFDPTISLKTVKLMKEGLEAARLKAHLMSQPLAYHTPDCNKQGFIDLPEFPFGLEPRVATRWDIQKYAREAYNLGVRYIGGCCGFEPYHIRAIAEELAPERGFLPPASEKHGSWGSGLDMHTKPWVRARARKEYWENLRIASGRPYNPSMSKPDGWGVTKGTAELMQQKEATTEQQLKELFEKQKFKSQ

SEQ ID NO: 162 - protein, 525 aa, Homo sapiens
MGWLFLKVLLAGVSFSGFLYPLVDFCISGKTRGQKPNFVIILADDMGWGDLGANWAETKDTANLDKMASEGMRFVDFHAAASTCSPSRASLLTGRLGLRNGVTRNFAVTSVGGLPLNETTLAEVLQQAGYVTGIIGKWHLGHHGSYHPNFRGFDYYFGIPYSHDMGCTDTPGYNHPPCPACPQGDGPSRNLQRDCYTDVALPLYENLNIVEQPVNLSSLAQKYAEKATQFIQRASTSGRPFLLYVALAHMHVPLPVTQLPAAPRGRSLYGAGLWEMDSLVGQIKDKVDHTVKENTFLWFTGDNGPWAQKCELAGSVGPFTGFWQTRQGGSPAKQTTWEGGHRVPALAYWPGRVPVNVTSTALLSVLDIFPTVVALAQASLPQGRRFDGVDVSEVLFGRSQPGHRVLFHPNSGAAGEFGALQTVRLERYKAFYITGGARACDGSTGPELQHKFPLIFNLEDDTAEAVPLERGGAEYQAVLPEVRKVLADVLQDIANDNISSADYTQDPSVTPCCNPYQIACRCQAA

SEQ ID NO: 163 - protein, 423 aa, Homo sapiens
MKLCSLAVLVPIVLFCEQHVFAFQSGQVLAALPRTSRQVQVLQNLTTTYEIVLWQPVTADLIVKKKQVHFFVNASDVDNVKAHLNVSGIPCSVLLADVEDLIQQQISNDTVSPRASASYYEQYHSLNEIYSWIEFITERHPDMLTKIHIGSSFEKYPLYVLKVSGKEQAAKNAIWIDCGIHAREWISPAFCLWFIGHITQFYGIIGQYTNLLRLVDFYVMPVVNVDGYDYSWKKNRMWRKNRSFYANNHCIGTDLNRNFASKHWCEEGASSSSCSETYCGLYPESEPEVKAVASFLRRNINQIKAYISMHSYSQHIVFPYSYTRSKSKDHEELSLVASEAVRAIEKISKNTRYTHGHGSETLYLAPGGGDDWIYDLGIKYSFTIELRDTGTYGFLLPERYIKPTCREAFAAVSKIAWHVIRNV

SEQ ID NO: 164 - protein, 576 aa, Homo sapiens
MAQGVLWILLGLLLWSDPGTASLPLLMDSVIQALAELEQKVPAAKTRHTASAWLMSAPNSGPHNRLYHFLLGAWSLNATELDPCPLSPELLGLTKEVARHDVREGKEYGVVLAPDGSTVAVEPLLAGLEAGLQGRRVINLPLDSMAAPWETGDTFPDVVAIAPDVRATSSPGLRDGSPDVTTADIGANTPDATKGCPDVQASLPDAKAKSPPTMVDSLLAVTLAGNLGLTFLRGSQTQSHPDLGTEGCWDQLSAPRTFTLLDPKASLLTMAFLNGALDGVILGDYLSRTPEPRPSLSHLLSQYYGAGVARDPGFRSNFRRQNGAALTSASILAQQVWGTLVLLQRLEPVHLQLQCMSQEQLAQVAANATKEFTEAFLGCPAIHPRCRWGAAPYRGRPKLLQLPLGFLYVHHTYVPAPPCTDFTRCAANMRSMQRYHQDTQGWGDIGYSFVVGSDGYVYEGRGWHWVGAHTLGHNSRGFGVAIVGNYTAALPTEAALRTVRDTLPSCAVRAGLLRPDYALLGHRQLVRTDCPGDALFDLLRTWPHFTATVKPRPARSVSKRSRREPPPRTLPATDLQ

SEQ ID NO: 165 - protein, 816 aa, Homo sapiens
MESRVLLRTFCLIFGLGAVWGLGVDPSLQIDVLTELELGESTTGVRQVPGLHNGTKAFLFQDTPRSIKASTATAEQFFQKLRNKHEFTILVTLKQTHLNSGVILSIHHLDHRYLELESSGHRNEVRLHYRSGSHRPHTEVFPYILADDKWHKLSLAISASHLILHIDCNKIYERVVEKPSTDLPLGTTFWLGQRNNAHGYFKGIMQDVQLLVMPQGFIAQCPDLNRTCPTCNDFHGLVQKIMELQDILAKTSAKLSRAEQRMNRLDQCYCERTCTMKGTTYREFESWIDGCKNCTCLNGTIQCETLICPNPDCPLKSALAYVDGKCCKECKSICQFQGRTYFEGERNTVYSSSGVCVLYECKDQTMKLVESSGCPALDCPESHQITLSHSCCKVCKGYDFCSERHNCMENSICRNLNDRAVCSCRDGFRALREDNAYCEDIDECAEGRHYCRENTMCVNTPGSFMCICKTGYIRIDDYSCTEHDECITNQHNCDENALCFNTVGGHNCVCKPGYTGNGTTCKAFCKDGCRNGGACIAANVCACPQGFTGPSCETDIDECSDGFVQCDSRANCINLPGWYHCECRDGYHDNGMFSPSGESCEDIDECGTGRHSCANDTICFNLDGGYDCRCPHGKNCTGDCIHDGKVKHNGQIWVLENDRCSVCSCQNGFVMCRRMVCDCENPTVDLFCCPECDPRLSSQCLHQNGETLYNSGDTWVQNCQQCRCLQGEVDCWPLPCPDVECEFSILPENECCPRCVTDPCQADTIRNDITKTCLDEMNVVRFTGSSWIKHGTECTLCQCKNGHICCSVDPQCLQEL

SEQ ID NO: 166 - protein, 485 aa, Homo sapiens
MSVPLLKIGVVLSTMAMITNWMSQTLPSLVGLNTTKLSAAGGGTLDRSTGVLPTNPEESWQVYSSAQDSEGRCICTVVAPQQTMCSRDARTKQLRQLLEKVQNMSQSIEVLDRRTQRDLQYVEKMENQMKGLESKFKQVEESHKQHLARQFKAIKAKMDELRPLIPVLEEYKADAKLVLQFKEEVQNLTSVLNELQEEIGAYDYDELQSRVSNLEERLRACMQKLACGKLTGISDPVTVKTSGSRFGSWMTDPLAPEGDNRVWYMDGYHNNRFVREYKSMVDFMNTDNFTSHRLPHPWSGTGQVVYNGSIYFNKFQSHIIIRFDLKTETILKTRSLDYAGYNNMYHYAWGGHSDIDLMVDESGLWAVYATNQNAGNIVVSRLDPVSLQTLQTWNTSYPKRSAGEAFIICGTLYVTNGYSGGTKVHYAYQTNASTYEYIDIPFQNKYSHISMLDYNPKDRALYAWNNGHQILYNVTLFHVIRSDEL

SEQ ID NO: 167 - protein, 504 aa, Homo sapiens
MRFFCARCCSFGPEMPAVQLLLLACLVWDVGARTAQLRKANDQSGRCQYTFSVASPNESSCPEQSQAMSVIHNLQRDSSTQRLDLEATKARLSSLESLLHQLTLDQAARPQETQEGLQRELGTLRRERDQLETQTRELETAYSNLLRDKSVLEEEKKRLRQENENLARRLESSSQEVARLRRGQCPQTRDTARAVPPGSREVSTWNLDTLAFQELKSELTEVPASRILKESPSGYLRSGEGDTGCGELVWVGEPLTLRTAETITGKYGVWMRDPKPTYPYTQETTWRIDTVGTDVRQVFEYDLISQFMQGYPSKVHILPRPLESTGAVVYSGSLYFQGAESRTVIRYELNTETVKAEKEIPGAGYHGQFPYSWGGYTDIDLAVDEAGLWVIYSTDEAKGAIVLSKLNPENLELEQTWETNIRKQSVANAFIICGTLYTVSSYTSADATVNFAYDTGTGISKTLTIPFKNRYKYSSMIDYNPLEKKLFAWDNLNMVTYDIKLSKM

SEQ ID NO: 168 - protein, 271 aa, Homo sapiens
MRGNLALVGVLISLAFLSLLPSGHPQPAGDDACSVQILVPGLKGDAGEKGDKGAPGRPGRVGPTGEKGDMGDKGQKGSVGRHGKIGPIGSKGEKGDSGDIGPPGPNGEPGLPCECSQLRKAIGEMDNQVSQLTSELKFIKNAVAGVRETESKIYLLVKEEKRYADAQLSCQGRGGTLSMPKDEAANGLMAAYLAQAGLARVFIGINDLEKEGAFVYSDHSPMRTFNKWRSGEPNNAYDEEDCVEMVASGGWNDVACHTTMYFMCEFDKENM

SEQ ID NO: 169 - protein, 652 aa, Homo sapiens
MATSMGLLLLLLLLLTQPGAGTGADTEAVVCVGTACYTAHSGKLSAAEAQNHCNQNGGNLATVKSKEEAQHVQRVLAQLLRREAALTARMSKFWIGLQREKGKCLDPSLPLKGFSWVGGGEDTPYSNWHKELRNSCISKRCVSLLLDLSQPLLPSRLPKWSEGPCGSPGSPGSNIEGFVCKFSFKGMCRPLALGGPGQVTYTTPFQTTSSSLEAVPFASAANVACGEGDKDETQSHYFLCKEKAPDVFDWGSSGPLCVSPKYGCNFNNGGCHQDCFEGGDGSFLCGCRPGFRLLDDLVTCASRNPCSSSPCRGGATCVLGPHGKNYTCRCPQGYQLDSSQLDCVDVDECQDSPCAQECVNTPGGFRCECWVGYEPGGPGEGACQDVDECALGRSPCAQGCTNTDGSFHCSCEEGYVLAGEDGTQCQDVDECVGPGGPLCDSLCFNTQGSFHCGCLPGWVLAPNGVSCTMGPVSLGPPSGPPDEEDKGEKEGSTVPRAATASPTRGPEGTPKATPTTSRPSLSSDAPITSAPLKMLAPSGSPGVWREPSIHHATAASGPQEPAGGDSSVATQNNDGTDGQKLLLFYILGTVVAILLLLALALGLLVYRKRRAKREEKKEKKPQNAADSYSWVPERAESRAMENQYSPTPGTDC

SEQ ID NO: 170 - protein, 406 aa, Homo sapiens
MGPSTPLLILFLLSWSGPLQGQQHHLVEYMERRLAALEERLAQCQDQSSRHAAELRDFKNKMLPLLEVAEKEREALRTEADTISGRVDRLEREVDYLETQNPALPCVEFDEKVTGGPGTKGKGRRNEKYDMVTDCGYTISQVRSMKILKRFGGPAGLWTKDPLGQTEKIYVLDGTQNDTAFVFPRLRDFTLAMAARKASRVRVPFPWVGTGQLVYGGFLYFARRPPGRPGGGGEMENTLQLIKFHLANRTVVDSSVFPAEGLIPPYGLTADTYIDLAADEEGLWAVYATREDDRHLCLAKLDPQTLDTEQQWDTPCPRENAEAAFVICGTLYVVYNTRPASRARIQCSFDASGTLTPERAALPYFPRRYGAHASLRYNPRERQLYAWDDGYQIVYKLEMRKKEEEV

SEQ ID NO: 171 - protein, 330 aa, Homo sapiens
MRCCHICKLPGRVMGIRVLRLSLVVILVLLLVAGALTALLPSVKEDKMLMLRREIKSQGKSTMDSFTLIMQTYNRTDLLLKLLNHYQAVPNLHKVIVVWNNIGEKAPDELWNSLGPHPIPVIFKQQTANRMRNRLQVFPELETNAVLMVDDDTLISTPDLVFAFSVWQQFPDQIVGFVPRKHVSTSSGIYSYGSFEMQAPGSGNGDQYSMVLIGASFFNSKYLELFQRQPAAVHALIDDTQNCDDIAMNFIIAKHIGKTSGIFVKPVNMDNLEKETNSGYSGMWHRAEHALQRSYCINKLVNIYDSMPLRYSNIMISQFGFPYANYKRKI

SEQ ID NO: 172 - protein, 382 aa, Homo sapiens
MGLLLPLALCILVLCCGAMSPPQLALNPSALLSRGCNDSDVLAVAGFALRDINKDRKDGYVLRLNRVNDAQEYRRGGLGSLFYLTLDVLETDCHVLRKKAWQDCGMRIFFESVYGQCKAIFYMNNPSRVLYLAAYNCTLRPVSKKKIYMTCPDCPSSIPTDSSNHQVLEAATESLAKYNNENTSKQYSLFKVTRASSQWVVGPSYFVEYLIKESPCTKSQASSCSLQSSDSVPVGLCKGSLTRTHWEKFVSVTCDFFESQAPATGSENSAVNQKPTNLPKVEESQQKNTPPTDSPSKAGPRGSVQYLPDLDDKNSQEKGPQEAFPVHLDLTTNPQGETLDISFLFLEPMEEKLVVLPFPKEKARTAECPGPAQNASPLVLPP

SEQ ID NO: 173 - protein, 505 aa, Homo sapiens
MGRVVAELVSSLLGLWLLLCSCGCPEGAELRAPPDKIAIIGAGIGGTSAAYYLRQKFGKDVKIDLFEREEVGGRLATMMVQGQEYEAGGSVIHPLNLHMKRFVKDLGLSAVQASGGLLGIYNGETLVFEESNWFIINVIKLVWRYGFQSLRMHMWVEDVLDKFMRIYRYQSHDYAFSSVEKLLHALGGDDFLGMLNRTLLETLQKAGFSEKFLNEMIAPVMRVNYGQSTDINAFVGAVSLSCSDSGLWAVEGGNKLVCSGLLQASKSNLISGSVMYIEEKTKTKYTGNPTKMYEVVYQIGTETRSDFYDIVLVATPLNRKMSNITFLNFDPPIEEFHQYYQHIVTTLVKGELNTSIFSSRPIDKFGLNTVLTTDNSDLFINSIGIVPSVREKEDPEPSTDGTYVWKIFSQETLTKAQILKLFLSYDYAVKKPWLAYPHYKPPEKCPSIILHDRLYYLNGIECAASAMEMSAIAAHNAALLAYHRWNGHTDMIDQDGLYEKLKTEL

SEQ ID NO: 174 - protein, 118 aa, Sus scrofa
MAWTVLLIGLLAVGSGVDSQTVIQEPAMSVSLGGTVTLTCAFSSGSVTSSNYPSWYQQTPGQPPRQLIYSTNSRPTGVPSRFSGAISGNKATLTITGAQAEDEADYFCALYKGSGTYT

SEQ ID NO: 175 - protein, 121 aa, Sus scrofa
QAWLGLLLPHVPLVSVSAGSLSQATVIQEPAMSVSPGGTVTLTCAFSSGSVTTSNYPGWYQQTPGQPPRQLIYQTNSRPTGVPSRFSGAISGNKATLTITGAQAEDEADYFCALEKSKVSV

SEQ ID NO: 176 - protein, 140 aa, Sus scrofa
MAWIPLLLGLLAHCTGSVASYEVTQPPSVSVNPGQRASITCEGNNIGRKDIQWYQQKPGQAPVLFIYEDTNRPSGIPERFSASKSGNTATLTISGAQAEDEADYYCHHENGHRDRGKDGGGNTEVDNMVPPTRRPGRLSL

SEQ ID NO: 177 - protein, 146 aa, Sus scrofa
MAWIPLLLGLLAHCTGSVASYEVTQPPSVSVNPGQRASITCEGNNIGRKDIQWYQQKPGQAPVLFIYEDTNRPSGIPERFSASKSGNTATLTISGAQAEDEADYYCQSYDDRDHPCVFHSHFLSDCDVQPLSRAHFSSLYLVWPSV

SEQ ID NO: 178 - protein, 113 aa, Sus scrofa
MAWTVLLIGLLAVGSGVDSQTVIQEPAMSVSLGGTVTLTCAFSSGSVTTSNYPSWFQQTPGQPPRLLIYRTNSRPTGVPSRFSGAISGNKAALTITGAQAKDEADYFCTLYKS

SEQ ID NO: 179 - protein, 137 aa, Sus scrofa
MAWTPLLLPLLSLCTGSVASYELTQPSSESVALGNTAKITCSGDLLDEKYTQWYQQKPGQAPLLLIYKDSERPSGIPERFSGSSSGKTATLTITGAQAEDEADYYCQSADSIDNAHSDTGRWGSGTQTPPRLGPPPP

SEQ ID NO: 180 - protein, 121 aa, Sus scrofa
MRFPAQLLGLLLLWVPGSDGAIVLTQTPLSLSVSPGEPASISCRSSQSLLHTDGKNYLNWYLQKPGQSPQRLIYQATNRDTGVPDRFSGSGSGTDFTLKISRVEAEDVGVYYCFQALQSPP

SEQ ID NO: 181 - protein, 124 aa, Sus scrofa
QAWLGLLLPHVPLVSVSAGSLSQATVIQEPAMSVSPGGTVTLTCAFSSGSVTTSNYPGWYQQTPGQPPRQLIYQTNSRPTGVPSRFSGAISGNKATLTITGAQAEDEADYFCALEKSSANATVM

SEQ ID NO: 182 - protein, 98 aa, Sus scrofa
SQTVIQEPAMSVSLGGTVTLTCAFSSGSVTSSNYPGWFQQTPGQPPRTVIYSTNSRPTGVPSRFSGAISGNKATLTITGAQAEDEADYFCALYKSCTN

SEQ ID NO: 183 - protein, 265 aa, Sus scrofa
MKAVVLTLAVLFLTGSQARHFWQQDDPQSPWDRVKDFATVYVDAIKDSGRDYVAQFEASALGKHLNLKLLDNWDSLGSTFTKVREQLGPVTQEFWDNLEKETEALRQEMSKDLEEVKKKVQPYLDDFQNKWQEEMETYRQKMAPLGAEFREGARQKVQELQEKLSPLAEELRDRLRAHVEALRQQLAPYSDDLRQRMAARFEALKEGGGSLAEYQAKAQEQLKALGEKAKPALEDLRQGLLPVLENLKVSILAAIDEASKKLNAQ

SEQ ID NO: 184 - protein, 287 aa, Sus scrofa
MIPPVLIFFLSFLCHAAIAGRTCPKPEELPFAVVVPLKSSYAPGEEIVYTCQPGYVSRGGIRRFICPLTGLWPINTLKCLPITCPPPPTPKFAKLSVYKPLAGNNSLYGGKAVFECLPQHAMFGNGTITCTEHGNWTELPECKEVKCPFPSRPENGFVNYPAKQVLYYQDKATYGCHDTYTLDGPEEVECNKFGNWSAQPSCKASCKLSVKRATVIYEGERVNIQDKFKNGMLHGQKISFFCKNKEKKCSYTEDAQCIDGTIEIPKCFKEHSALAFWKTDASDVKPC

SEQ ID NO: 185 - protein, 202 aa, Sus scrofa
MLVPRAAPLLTLLLATGSLGQRAQRPPRRPSPISTIQPKASFDAQQFAGTWLLVAVASSCRFLQEQGHRAEATSLHVAPQGAAMAVSTFRKLDGICWQVRQLFRDTGLPGRFLLQARGARGAVDVVVGETDYRSFAILYLERARQLSVKLYARSLPVSESALSVFEQRVQGANLTEDHILFFPKYGFCDAADQFHVLDEAKQ

SEQ ID NO: 186 - protein, 116 aa, Sus scrofa
MAAGSVPMQLQLRATIRTKNGLCVPRKWIYRLSEGNTDLRTEGRPDMKTKLFSSTCPGGIMLKETGQGYQRFLLYNRSPHPPEKCVEEFQSLTSCLDFKAFLLTPRNQEACELSSN

SEQ ID NO: 187 - protein, 549 aa, Sus scrofa
MGSNRCPRLGLVPLILGLLSGGVSMTPLPEARPQSPCSLEGIEIKGGTFHLLKEGLVLEYVCPSGFYPYPVQIRTCRSSGSWSTLQTQDRKIVKRAECKAIRCPRPQDFENGEYWPRAAYYNLSDEISFHCYDGYTLRGSANRTCQVTGRWDGQTAICDDGAGYCPNPGIPIGTRKVGTQYRLEDSVTYYCSRGLTLRGSQRRTCQEGGSWSGTEPSCQDSFMYDTPAEVAEAFLSSLTETIEGVDAEDGHIPGDQQKRKIVLDPSGSMNIYLVLDGSDSIGARNFTGAKNCLKDFIEKVASYGVKPKYGLVTYATDPKVLIRVSNPKSADADWVTEQLDKISYDDHKLKAGTNTKKALLEVYNMMSWGVNNFPDNWNRTRHVIVLLTDGLHNMGGDPVTVIHDIRDLLNIGRNRKNPREDYLDIYVFGVGPLVNQENINALASKKDKEQHVFKLKDVDNLEDVFFQMLDESRSLGLCGMVWEHKDGTDYHKQPWHAKISITRPSKGHESCMGAVVSEYFVLTAAHCFTVDDEKHSIKVSLGKDATNQS

SEQ ID NO: 188 - protein, 372 aa, Sus scrofa
MIFPWKCHSAQRGLWNVFKLWVLTMLCCDFFAYHGTDCWTYHYSEKPMNWMKARKFCQENYTDLVAIQNKGEIEYLNKTLPFSRSYYWIGIRKVEGVWTWVGTNKSLTEEAENWGDGEPNNRKTKEDCVEIYIKRSKDSGKWNDDACHKAKRALCYTASCQPRSCSGHGQCVEVINNYTCNCDAGYYGPQCQFVTQCEPLGDPELGTMACIHPLGKFYFTSQCTFNCSEGTDITGIEETTCGPFGNWSSPEPTCRVILCEPLTAPDLGNMDCSHPLASFGFTSTCTFNCSEGTQLIGEKKTICGSSGNWSSPSPICQKLDRNFSINKEVDYNPLFIPVAVIVTAVSGLAFIIFLARKLKKGKKSQRSMDDPY

SEQ ID NO: 189 - protein, 221 aa, Sus scrofa
MGAAARSLRLALGLLLLLGTLLRPADACSCSPVHPQQAFCNADVVIRAKAVSEKEVDSGNDIYGNPIKRIQYEIKQIKMFKGPDKDIEFIYTAPSSAVCGVSLDIGGKKEYLIAGKAEGHGKMHITLCDFIVPWDTLSTTQKKSLNHRYQMGCECKITRCPMIPCYISSPDECLWMDWVTEKNINGHQAKFFACIKRSDGSCAWYRGAAPPKQEFLDIEDP

SEQ ID NO: 190 - protein, 101 aa, Sus scrofa
MGARSFLALFLILLLLASEAQGAHVPPQDEPDSPALLTKVQESLYGYWDTAKATAQDLYRKTYLPTVDEKIRDMYSKSTAAVTIYAGIFTDQVLSLLTGDH

SEQ ID NO: 191 - protein, 407 aa, Sus scrofa
MAPVGDKKAKKGILERLNSGEVVIGDGGFVFALEKRGYVKAGPWTPEAAVEHPEAVRQLHREFLRAGSNVMQTFTFYASEDKLENRGNYVAEKISGQKVNEAACDIARQVADEGDALVAGGVSQTPSYLSCKSETEVKKVFRQQLEVFMKKNVDFLIAEYFEHVEEAVWAVEALKASGKPVAATMCIGPEGDLHGVTPGQCAVRLVKAGASIVGVNCHFDPTISLQTVKLMKEGLQAAGLKAHLMSQPLAYHTPDCGKQGFIDLPEFPFGLEPRVATRWDIQKYAREAYNLGVRYIGGCCGFEPYHIRAIAEELAPERGFLPPASEKHGSWGSALDMHTKPWVRARARKEYWENLRIASGRPYNPSMSKPDAWGVTKGTAELMQQKEATTEQQLRELFEKQKFPSAQ

SEQ ID NO: 192 - protein, 259 aa, Sus scrofa
MLPLCLVAALLLLASGPRPSLGDEAIHCPPCSEEKLARCRPPVGCEELVREPGCGCCATCALGKGMPCGVYTPRCGSGLRCYPPRGVEKPLHTLMHGQGLCMELAEIEAIQESLQPSDKDEGDHPNNSFSPCSPQDRRCLQKHLAKIRDRSTSGGKMKVIGAPREEARPVPQGSCQSELHRALERLAASQRRTHEDLYIIPIPNCDRNGNFHPKQCHPALDGQRGKCWCVDRKTGVKLPGGLEPKGELDCHQLADSFRE

SEQ ID NO: 193 - protein, 2335 aa, Sus scrofa; identical to SEQ ID NO: 152

SEQ ID NO: 194 - protein, 147 aa, Sus scrofa
MVHLSAEEKEAVLGLWGKVNVDEVGGEALGRLLVVYPWTQRFFESFGDLSNADAVMGNPKVKAHGKKVLQSFSDGLKHLDNLKGTFAKLSELHCDQLHVDPENFRLLGNVIVVVLARRLGHDFNPDVQAAFQKVVAGVANALAHKYH

SEQ ID NO: 195 - protein, 222 aa, Sus scrofa
MEKLSLCLLVIISLSNAFAQTDMIGKAFVFPKESENSYVSLTARLTKPLTAFTVCLRVYTDLNRDYSLFSYATKTQYNEILLFRGKTAVYSISVGGADVIFKPHQSSEPMHFCMTWESTSGITELWVDGKPMVRRSLKRGYSLGTQASIILGQEQDAFAGGFEKNQCLVGDIGDVNMWDYVLSPEEINTVYAGGTFSPNVLNWRALRYEMSGEVYVKPQLWP

SEQ ID NO: 196 - protein, 423 aa, Sus scrofa
MKLYSFAVLVAAVLLCEQDVFAFQSGQVLSALPRTSRQVQILQNLTTTYEIVLWQPVTADVIEKKKEVHFFVNASDVSAVKTHLNESGIPSSVLLENVEDLIQQQTSNDTVSPRASSSYYEHYHSLDEIYSWIEVITERHPDMIEKIHIGSSYEKRPLYVLKVSTKEQKAKTAVWIDCGIHAREWISPAFCLWFIGHATHFYGAEKLYTSLLRHMDFYVMPVVNVDGYDYTWKKNRMWRKNRSFHENNPCIGTDLNRNFASKHWCEEGASSFSCSETYCGPYPESEPEVKAVADFLRRNINHIKAYISMHSYSQKIVFPYSYSRSKTKDHEELSLLASEAVHAIEKTSKHIRYTHGSGSESLYLAPGGSDDWIYDLGIKYSFTIELRDTGRFGFLLPARFIKPTCREAFAAVSKIAWHVIRNV

SEQ ID NO: 197 - protein, 627 aa, Sus scrofa
MARGSVSDEEMMELREAFAKVDTDGNGYISCNELNDLFKAACLPLPGYRVREITENLMATGDLDRDGRISFDEFIKVFHGLKSTEVAKTFRKAINKKEGICAIGGTSEQSSVGTQHSYSEEEKYAFVNWINKALENDPDCRHVIPMDPNTNDLFSAVGDGIVLCKMINLSVPDTIDERTINKKKLTPFTIQENLNLALNSASAIGCHVVNIGAEDLKEGKPYLVLGLLWQVIKIGLFADIELSRNEALAALLREGESLEDLMKLSPEELLLRWANYHLENAGCNKINNFSSDIKDSKAYYHLLEQVAPKGDEEGIPAVVIDMSGLREKDDIQRAECMLQQAERLGCRQFVTATDVVRGNPKLNLAFIANLFNRYPALHKPENQDIDWGALEGETREERTFRNWMNSLGVNPRVNHLYSDLSDALVIFQLYEKIKVPVDWNRVNKPPYPKLGGNMKKLENCNYAVELGKNQAKFSLVGIGGQDLNEGNRTLTLALVWQLMRRYTLNILEEIGGGQKVNDDIIVNWVNETLKEAGKSTSISSFKDPKISTSLPVLDLIDAIQPGSINYDLLKTENLNDEEKLNNAKYAISMARKIGARVYALPEDLVEVNPKMVMTVFACLMGRGMKRV

SEQ ID NO: 198 - protein, 495 aa, Sus scrofa
MQRSPHPLMLFLLLASVCGKHGLVGQPVDGGEDPKSADPRWGQMKSRNQSRPLLPTDFHKDTVTNEWIADGEEDEDYLDLEKIFGDDDDYIDIVDAVSPADPMASAGNVLQLFPGKSRIQRLNILNAKFAFNLYRALKEQASASDNIFLAPVGISTAMGMLCLGLRGETHKQVHAALHFTDFVNASSKYELGTIHNLFRKLTHRLFRRDFGYTLRAVNDLYVQRQFPILDDFRTKVRQYYFAEVQAADFADPAFLSETNHHVARLTKGLIKDTLQDIDPATQMMILNCIYFKGSWVNKFPVEMTHNHNFRLNEREVVKVPMMQTKGAFLAASDQELDCEILQLDYVGGVSMLVVVPHKLSGMKTLEAQLTPQVVEKWQKSMTNRTREVLLPKFKLEKDYNLVEALRSVGVTALFDRNSNLTGISDQRIAIDLFKHHGTITVNEEGTQAAAVTTVGFMPLSTQARFSVDRPFLFLIHEHRTGCLLFMGRVANPARS

SEQ ID NO: 199 - protein, 211 aa, Sus scrofa
MRPRSGQVGHEDLRRQSPGPGQHWPLILLGLAMGAHGLLPPTTAPQSRAPGTEAPARSSPWRLWDRFLLRPPPRGTGPRCWPARFWSEPQPPWVVFGGGTRLTVLGQPKAAPTVTLFPPSPEELSTNKATLVCLISDFYPGAVTVTWKAGGTTITQGVDTSQPSKQSNNKYAASSYLALSASDWKSSSGFTCQVTHQGNTVEKTVMPSECA

SEQ ID NO: 200 - protein, 194 aa, Sus scrofa
MARSCALLSWALLALFALLGAAGGGPANCIPIVSRREWGALASECSANLRRPVRYVVVSHTAGSTCDNPASCRRQVQNVQHYHVRTLHWCDVGYNFLIGEDGLVYEGRGWNTVGAHSGPTWNPLSLGISFMGNYMNRVPPARAIRAAQSLLACGVALGVLRPNYEVKGHRDVQPTLSPGDQLYEIIQKWPHYRA

SEQ ID NO: 201 - protein, 317 aa, Sus scrofa
MRVLWVALVVTLLAGCRTEDEPGPPPEVHVWWEEPKWQGSQPWEQALGRFWDYLRWVQSLSDQVQEELLSTKVTQELTELIEESMKEVKAYREELEAQLGPVTQETQARLSKELQAAQARVGADMEDVRNRLVLYRSEVHNMLGQTTEELRSRLASHLRKLRKRLLRDTEDLQKRLAVYQAGLREGAERSVSALRERLGPLVEQGRLRAATLSTRAGQPLRERAEAWGQKLRGRLEEMGSRTRDRLDEMREQLEEVRTKVEEQGSQLRLQAEAFQARLKGWFEPLVEDMRRQWAGLVERMQSAVSISSSTSAPSDNQ

SEQ ID NO: 202 - protein, 52 aa, Sus scrofa
GPGAFQGFVQTYYDDHLRDLGSRTKAWIHSSKDSLLNKAHSLCPQLFCGSRD

SEQ ID NO: 203 - protein, 201 aa, Sus scrofa
MRLASLVSSCSLLLLLGTLPGWAANDDPIEKVIEGINRGLSNAEREMGKALEGINNGITQAGREVEKVFHGLNNMGNQAGKELDKGIQGLNHGMDKVAHDINHGIGQAGKEAEKFVHGANYAAGQVGKEADKVIQGAHHGVNQAGKEAEKFGQGVHHAAGQAGKEAEKFGQGVHHAAGQAGKEGDKIVQGAHHGINQAGKE

SEQ ID NO: 204 - protein, 459 aa, Sus scrofa
MARALGTVGAPWLLGLCCSLAIAHPLSLTAGPKHGAEGRNESKPDPDVTERCSDGWGFDASTLDEHGAMLFFKGPSVWAGQNWTRGLISERWKNAPSSVDAAFRRGHDRVFLIQGDKVWVYPPEKEKENPRSLQEEFPGVPSPLDAAVECHRGECQDEGVLFFQGTHTWFWDSTTKTTKERLWPAVGNCSSAMRWISRYYCFRGNQFLRFDPVTGHVDPKYPRDVRDYFMSCPAEGHAHRNATHRGDDRCSPDLVLTALLSDNHGATYAFRGTHYWRLDTSRDGWHSWPIDHQWSHGPSAVDAAFSWDDKLYLIQGTQVYIFLTKAGYTLVDNYPKQLEKELGSPHGISLDAVDATFVCPGTSRLHVMAGRKLWWLDLSLGAQGPWTELPWPHEKVDAALCTEKSLGPNSCSASGLGLYIVHGPHVYCYKDVEKLVSAKALPQPQSVNSLLGCHRSRGS

SEQ ID NO: 205 - protein, 536 aa, Sus scrofa
MPSVQSPAPDCSLRPSRPRLQSGGRDQQDNQPPSAPVSEPCPKACHRRDRDTVLGHTMVGLPSLVLLSASLAGLLLPGGSVFLPRDRAHSVLERARRANSFWEEMKKGNLERECLEETCSYEEAREVFEDQQKTDEFWNKYKDGDQCESSPCQNQGKCKDGLGEYNCTCAEGFEGKNCELLTRKLCSLDNGDCDQFCREEQSSVVCSCASGYILGDNGKSCISTEPFPCGKRTLGRSRRSADHGSEAAPEAGRSEQEPGDLGPTEGPLHLLSLNDTEPGPEEDEDESSLVRIVGGRDCREGECPWQALLVNEENEGFCGGTILSEFHVLTAAHCLHQAKKFKVRVGDRNLEKEEGDEAAHEVEVTVKHSRFVRETYDFDIAVLKLKTPITFRTNVAPACLPEKNWAEATLLTQKTGIVSGFGRTHERGRPSSTLKMLEVPYVDRNTCKLSSSFLITPNMFCAGYDEQPEDACQGDSGGPHVTRFRDTYFVTGIVSWGEGCARRGKYGVYTKVTNFLKWIERSMRARAEAGAEPHPQ

SEQ ID NO: 206 - protein, 543 aa, Sus scrofa
MALLVFLLLESSSTVRLVGGPHRCEGRVEVQQNGEWGTVCDDGWGMEDVAVVCRELNCGEAKWTPSGTLYTPSTDKDQKVFLQEVICQGHELNLSQCDQVEVFDCTHDEDAGAQCEKPSLTVRLAGGPHRCEGRVEVQQNGEWHTMCHAGWGMEEAAVVCRELNCGEAKGTPRGTAYEPSTGTDQKVLMQEVICQGHELNLTACEPVDIFDCFHNEGAGVQCEKPSLTVRLAGGPHRCEGRVEVQQNGEWHTMCHAGWGMEEAAVVCRELNCGEAKGTPRGTAYEPSTGTDQKVLMQEVICQGHELNLTACEPVDIFDCFHNEGAGVQCEMLENVRLVGGPRRCKGRVEVKHQGKWGTVCKAGWNLSAVKVVCRQLGCGKALLTKRCCSTTQGQGPIWLSEVSCSGRELSLQRCSSGILGKNNCTHDDDMCVECEDPFDLRLVGGDTNCSGRLEVLHKGEWGSVCDDGWGEEEDRTVCKQLGCGESLFPSAKIQKFGRGVGRIWLDDVRCSGKEKSLEQCQHRFWGHHDCNHKEDVAVICSEP

SEQ ID NO: 207 - protein, 2258 aa, Sus scrofa
MFPALPCPWVLVVLGTSWAAWGNLGTEAARVRQFYVAAQSISWNYHPEPTHPSSSPFATSFKKIVYREYEAYFQKEKPPSRMSGLLGPTLYAEVGDIMKVHFRNKADKPLSIHPQGIKYSKFAEGASYPDHTFLVEKMDDAVAPGQEYTYEWNISEDSGPTHNDPPCLTHIYYSYENLIQDFNSGLIGPLLICKKGTLTEDGIQKMFDKQYVLMFAVFDESKSWNQSSSLMYTVNGYVNGTMPDITVCAYDHISWHLIGMSSGPELFSIHFSGQVLEQNHHKVSAITLVSATSTTANMTVSPEGKWPISSLIPKHFQAGMQAYIDIKNCAKKTRKPKKLTRDQRRHIKRWEYFIAAEEVIWDYAPIIPANMDKKYRSLHLDNFSNQIGKHYKKVVYKQYQDESFTKRLENPNNKEDGILGPVIRAQVRDTLKIVFKNMASRSYSIYPHGVTFSPYEDDVNSSSTSDNNTMIRAVQPGETYTYKWNILESDEPTENDAQCLTRPYYSNVDITRDIASGLIGLLLICKSRSLDKRGIQRTADIEQKAVFAVFDENKSWYIEDNIYKFCENPEKVKRDDPKFYESNIMSTINGYVPESIPTLGFCFDDTVQWHFCSVGNQNNILTIHFTGHSFIYGKRHEDTLTLFPMRGESVTVTMDNVGTWMLTTMNSNPRNKKLQLKFRDVKCIRDDDEDSYEIIYEPSSSTTLTTRKMHDSSENKEEENDDEYDYQDLLASVLGIRSFRNSSLYQEDDEFNLTALALENNSEFIPPSTDRAVDSNSSSPGNISRAPANTFTEPQKILPHPEATKAGSPRRHTGLVKNLVLNRRRTQHSDPYSEDPIENPLQSVITGISLLPFGTEGFRNREHPKHKRFKAGRDQAAKHRFSQMEFPAHKTGRHISQDNSSSSSIGPLEDLSSDLLLLERKDPSTINGKWHLVSEKGSYEIVQDADEDMAVNKLPNNPQNASRSWGENIPFTNKHGKQRGHPIFVTRHKLLQERQDEGNSILKKGRFFIRTRRKKKERKPVHHVPLSPRSFNPLRGEANTPFSDRRQNHSLLLHESNETFPPTDLNQTFPSMNLSLIASHPDHNQNLPNDTHQTSSPLDLYQTVTPDEPYQTAPIQDLDPTHSTAVPSHQSSLPEPIQMHDYDLRNKASPTDVSEMFFSLKLKAGHRTTSPDLNQPSFSPELSQTTLSPDPGHVTLSQDLSQTTLSPDLSHTTLSPDLGHTTLSPDLSHTTLSPDLSQTTLSPDLSHTTLSPDLGHATLSPDLSHTTLSPDLGHATLSPDLSHTTLSPDLGHTTLSPDLGHTTLSPDFSQTTLSPDLGHTTLSSDLSHTTLSPDLSHTTLSPDLSHTTLSPDLGHTTLSPDFSQTTLSPDLGHMTLSPDLSHTTLSPDLGHTTLSPDFSHTTLSPDLGHMTLSPDLDQTTLSLDFGQTTLSPDLSHMTLSSELSHETVSPDLSHVTLSPDLREIPFSPDLRQATLSPDINETTLSPDLRQTSPHLDPDKTSYISESSQSVTLPEFGQTSPFPDLGQRPSPPSHSTLNNTFIPREFNPMVVVGLSRDDGDYVEIIPRQQEENSEEDYVKIDYVEYDDPYQTDVRTDINSSRNPDNIAAWYLRSNNGNRRNYYIAAEELSWDYSKFTQREDIDDVPEHTIYKKVVFRKYLDSTFTKLDPRGEYEEHLGILGPIIRAEVDDVIQVRFKNLASRPYSLHAHGLSYEKSSEGKTYEDDSPEWFKEDNAVQPNSSYTYVWHATERSGPESPGSACRAWAYYSAVNPEKDIHSGLIGPLLICRKGTLHKENNMPVDMREFVLLFMVFDEKKSWYYEKKFTRSWRLTSSEVKNSHKFHAINGMIYNLPGLRMYEQEWVRLHLLNLGGSRDIHVVHFHGQTLLENGTQQHQLGVWPLLPGSFKTLEMKTSKAGWWLLDTEVGENQRAGMQTPFLIIDRECKMPMGLSTGLIADSQIKASEFWGHWQPKLARLNNGGSYNAWITDKFSGESNSKPWIQVDMQREVVFTGIQTQGAKYYLKSYYTTEFNVAYSSDQRNWRIFKGNSTKNVMYFNGNSDASTITENQFDPPVVARYIRISPTESYNKPALRLELQGCEVNGCSTPLGMESGNIKNEQITASSFKKSWWGDYWEPFRARLNAQGRVNAWQAKANNNNQWLQIDLLKIKKITAITTQGCKSLSSEMYVKRYTIQYSDRGVEWKSYREKSSMVDKIFEGNNNIKGHVKNFFNPPIISRFIRIIPKMWNQSIALRLELFGCDIY

SEQ ID NO: 208 - protein, 462 aa, Sus scrofa
MRRLNVIMAESLGLVSICLLGYLLSAECTVFLDRENATKILHRPKRYNSGKLEEFVRGNLERECIEEKCSFEEAREVFENTEKTNEFWKQYVDGDQCEPNPCLNGGLCKDDINSYECWCQVGFEGKNCELDATCNIKNGRCKQFCKTGADSKVLCSCTTGYRLAPDQKSCEPAVPFPCGRVSVSHSPTTLTRAEIIFSNMDYENSTEVEPILDSLTESNQSSDDFIRIVGGENAKPGQFPWQVLLNGKIDAFCGGSIINEKWVVTAAHCIEPGVKITVVAGEYNTEETEPTEQRRNVIRAIPHHSYNATVNKYSHDIALLELDEPLTLNSYVTPICIADKEYTNIFLKFGSGYVSGWGRVFNRGRSATILQYLKVPLVDRATCLRSTKFTIYSNMFCAGFHEGGKDSCQGDSGGPHVTEVEGTSFLTGIISWGEECAVKGKYGIYTKVSRYVNWIKEKTKLT

SEQ ID NO: 209 - protein, 1741 aa, Sus scrofa
MRLLWVLIWASSFFALSLQKPRLLLFSPSVVHLGVPLSVGVQLQDAPPGQVVTGSVFLRNPSSTRDRCSPKVEFSLSSERDFVLLSLQISVAGAKECGLHLLRRAPDVQLVAQSSWLKDYLSKKTNIQGVNLFFSSRRGHIFLQTDQPVYNPGQRVRYRVFALDQKMRPTEETLTVMVENSHGLLVRKKEVYVPSSIFQDDLVIPDIAEPGTWKISARFSDGLDSNSSTQFEVKKYVLPNFEVTITPEQPYILTAPGFLNEIQMVIQARYVYGKPVQGVAYVRFGLLDEDDKKIFLRGLENQTKLVEGQCHISLPEAKVQGALQKLNITINDLPGKRLYVVAAVIESPGGEMEEAELTSWRFVSSPFSLDLSKTKRHLIPGAPFLLQALVRDVSGSPAAGIPVKVSAKLFSGSAPKNQDFQQNTDERGHVTVPIGIPKTISEMQLSVSAGSPHPATGTIIVRAPPPRSPGFLSIEQLDTRPPKVGDTLNLNLRAMGLVGSFSHFYYMILSRGQIVSVHRELRRDLTSVSVFVDHHLVPSFHFVAFYYQGGLPVANSLRVDIQAGACEGKLELNVDSGKAYHPGETLKIRLQTDSPALVALGAVDTALYAVGSKSHKPLNMAKVFEAINHYDLGCGPGGGDSATQVFEAAGLAFSDGDQLTPTRKSLGCPKKTKIRRKRNVNFQTAINEILGRYSSPLAKRCCQDGLTQLPMARTCAERVARVKNPACQEPFLSCCQFAEALRKKTRRGQGGFARAMELLQEEELIEEDDIPVRSFFPENWLWRVEEVPHSLQLSLLLPDSLTTWEIHGVSLSKSTGLCVATPARVRVFREFHLHLRLPVSIHRFEQLELRPVLYNYLDKDVPVSVHVSPVEGLCLAGGGGLAQQVLVPAGSARPVGFSVVPISAAAVSLKVVARGSFDFPVGDAVSKILQIANEGAIHQEELVYALNPQNVLGRNLEIPGHSDPNVIPDGDFRSFVRLTASDPLDTLGSEGALSPGGLASLLRLPRGCAEQTMFYLAPTLAASRYLDKTEQWSTLPPETKDHAVDLIQKGYTRIQEFRKNDGSYGAWLHRESSTWLTAFVLKVLSLAQEQVGGSPEKLQETAAWLLLQQKEDGSFHDPCPVIHRDMQGGLVGNDEKVALTAFVVIALHHGLAVFQDRNAEQFKRVENAISTANDFLGEKVSSGLLGSHAAAISAYALSLSGAPEQLQDIAHNNLMAMAQKIGDHLFWGTVPSSQSNTLSPTPAPQRPTDPMPQAPALWIETTAYALLHLLIREGKAEMADQTASWLTRQGSYKGGFRSTQDTVIALDALSAYWILSHTTEEKELNVTLSSMSRGGFKSHVVRLTNHQVKGLEEELQFSLGSKINVKVGGNSKGTLKILRAYNVIDLKNTTCQDLQIEVTVKGHVEYMLEANEDYEEYEYEDLPAQDDPGAHSQPVTPLQLFDGRRNRRRREAPKVAEEQESRVQYTVCIWRNGQVGLSGMAIADITLLSGFYAERADLEKLTSLSDRYVSHFETEGPHVLLYFDSVPTSRECVGFGAVQEVAIGLVQPASAVLYDYYNPEHKCSVFYGAPSKSKFLSTLCSADVCQCAEGKCPRQRRALERGLQDLDGYRMKFACYSPRVDYAFQVKVLREDSRAAFRLFETSITQVLHFTKDVKAAAAQARNFLVRASCRLHLEPGKEYLIMGLDGTTHDLKGDPQYLLDSNCWIEEMPSERLCRSTRHREPCAQLRDFIQEYSTQGCQV

SEQ ID NO: 210 - protein, 765 aa, Sus scrofa
MGSNRCPRLGLVPLILGLLSGGVSMTPLPEARPQSPCSLEGIEIKGGTFHLLKEGLVLEYVCPSGFYPYPVQIRTCRSSGSWSTLQTQDRKIVKRAECKAIRCPRPQDFENGEYWPRAAYYNLSDEISFHCYDGYTLRGSANRTCQVTGRWDGQTAICDDGAGYCPNPGIPIGTRKVGTQYRLEDSVTYYCSRGLTLRGSQRRTCQEGGSWSGTEPSCQDSFMYDTPAEVAEAFLSSLTETIEGVDAEDGHIPGDQQKRKIVLDPSGSMNIYLVLDGSDSIGARNFTGAKNCLKDFIEKVASYGVKPKYGLVTYATDPKVLIRVSNPKSADADWVTEQLDKISYDDHKLKAGTNTKKALLEVYNMMSWGVNNFPDNWNRTRHVIVLLTDGLHNMGGDPVTVIHDIRDLLNIGRNRKNPREDYLDIYVFGVGPLVNQENINALASKKDKEQHVFKLKDVDNLEDVFFQMLDESRSLGLCGMVWEHKDGTDYHKQPWHAKISITRPSKGHESCMGAVVSEYFVLTAAHCFTVDDEKHSIKVSLGGKKQEWEIDQVLFHPNYDLNAKTAKDIPEFYDYDVALIRLSKKLKYDQTIRPICLPCTEGSNQALRLPLTTTCQQQMQELLPAKDVKALFVSELTKDHRKILTRKEVYIKNGERKAACERDALQAQGYEKVKVVSEVVTPRFLCTGGVIPYADPNTCKGDSGGPLIIHKKSRFIQVGVISWGVVDICKRQQQAPSYARDFHINLYKVLPWLKEKLKDEDLGFL

SEQ ID NO: 211 - protein, 853 aa, Sus scrofa
MCVHVCLCGGGVGAVHSVCDADQLTPWMCWDYGDRAKFHPLSSVPDPIIFSRTRERSLLPLPRFLSLAADEAAVSQLWVSGSQMTFPPRGSLLLPVPKVDTMDPLMVVLCLLPLYPGLATAAPSCPQNVNIAGGSFTLSNGWAPGSILTYSCPLGYYPFPVASRLCNSNGQWQIPRATRSTKPVCKPVRCPAPVSFENGVYTPRLGSHPVGGNLTFECEDGFTLRGSPVRQCRPNGMWDGETAVCDNGASHCPDPGISVGAVRTGSRFGPGDKVRYRCSSNLVLTGSMERECQDNGVWSGTEPICRQPYSYDFPEDVTPALGTSFSHLLGATNPTQTKKTENVGRKIQIQRSGHLNLYLLLDASQSVSEEDFGVFKRSASLLVDRIFSFEINISVAIITFASKPKIIMSVLKDKSRDVTEVVHSLENINYKDHENGTGTNIYEALNSVYIMMNNQMQNLGMNTMAWQEIRHAIILLTDGKSNMGGSPKPAVDNIKEILNIKEKRKDYLDIYAIGVGNVEVDWRELNELGSKKDGERHAFILKDTEALSQVFEHMLDVSQLTDTICGVGNMSANASAQERTPWHVTIKPKSHETCRGALISDQWVLTAAHCFSHSEDHSLWRVSVGDPNSQWGKEFRIEKAVISSEFNVSAKKHQGIPEFYGDDIALLKLDQKVKMSTHARPICLPCTVGANLALRRHPGSTCRDHEKELLNQLSVPAHFVALNGSKLNVHLKTGSDWTSCIQAVSQDKVTFPNLTNVREVVTDQFLCSGTKEDDNPCKGESGGSVFLERRFRFFQVGLVSWGLYSPCSSSNKNLRKKAPRGRIPPPRDFHINLFRLQPWLRQHLEGILNFLPL

SEQ ID NO: 212 - protein, 583 aa, Sus scrofa
MWTLVSWVALVTGLVAGTQCPDGQLCPVACCLDPGGASYSCCNPVPDKWPKALSQHLGVPCKTKAQCPPGHSCILTTNETSNCCPFPEAVSCRDGLHCCPQGFHCSADGWSCLRRPDTKPSDDILCPNSQFHCPNSSTCCTMLDGSWGCCPMPQASCCGDKVHCCPHGTSCDLAHSRCLTVTNTHPMAKIPSQETIKTAVQCPDAESQCHNNSTCCKLSSGKYGCCPLPNATCCSDHIHCCPHGFVCDPVKKKCFSKENEAIDFFTKLPAHSVQEVKCDTEVSCPDDYTCCRLQSGKWGCCPFVQAVCCNDHVHCCPTGYQCNIEKGTCDLETQWVPWKEKIPASLSRPDLLAMERDVPCDNVSSCPSSSTCCPVTPGEWGCCPAPEAVCCSDHQYCCPKGHTCVGKGHCKRKKDMVTGLNKMPTRRASASQPGNTTGCDQHTSCPVGQTCCPSLSKGWACCQLPHAVCCEDRQHCCPAGYTCNVKARTCEKEEDSALPATHLARVGDVACGERRFCHNNYTCCRDSLGGWACCPYRQGICCADGRHCCPAGFRCGARGTKCLHKEALRWDAPLRDPAPRQLL

SEQ ID NO: 213 - protein, 712 aa, Sus scrofa
MQVFLPLPVLLASLALFQAAASATKAQTPSTAAISDAVNQAKVQVNKAFLDSRTRLKTAMSTEAPTTRQLSEYLKHAKGRTRTAIRNGQVWEESLKRLRQKATQTNVTDPSLDLTALSWEVGCDAPVPMVKCDENSPYRTITGDCNNRRNPALGAANRALARWLPAEYEDGLSLPFGWTPGKTRNGFPVPLAREVSNKIAGYLNEEDVLDQNRSLLFMQWGQVVDHDLDFAPDTELGSSEYSKAQCDEYCIQGDNCFPIMFPRNDEKVRTQGKCMPFFRAGFVCPSPPYQSLAREQINALTSFLDASLVYGPEPSLARRLRDLSSPLGLLAVNQEAWDHGLAYPPFDSKKPSPCEFINTTARVPCFLAGDSRASEQILLATSHTLLLREHNRLARELKRLNPQWDGEKLYQEARKILGAFIQIITFRDYLPIVLGDEMEKWIPPYQGYNQSVDPRISNVFTFAFRFGHLEVPATMSRLDENYQPWGPEAELPLHTLFFNTWRIVKDGGIDPLVRGLLAKKSKLMNQDKMMTGELRNKLFQPTHKIHGFDLAAINIQRGRDHGMPGYNSWRGFCDLSQPQTLEELRAVLKNEKLAKKLLDLYGTPDNIDIWIGGTAEPLVERGRVGPLLACLLGRQFQQIRDGDRFWWENPGVFTEKQRNALQKMSFSRLVCDNTHITKVPLHPFQANSYPHGFVDCSAIDKLDLSPWASVED

SEQ ID NO: 214 - protein, 624 aa, Sus scrofa
MKLSLVAAVLLLLGAARPEEEDKKEDVGTVVGIDLGTTYSCVGVFKNGRVEIIANDQGNRITPSYVAFTPEGERLIGDAAKNQLTSNPENTVFDAKRLIGRTWNDPSVQQDIKFLPFKVVEKKTKPYIQVDIGGGQTKTFAPEEISAMVLTKMKETAEAYLGKKVTHAVVTVPAYFNDAQRQATKDAGTIAGLNVMRIINEPTAAAIAYGLDKREGEKNILVFDLGGGTFDVSLLTIDNGVFEVVATNGDTHLGGEDFDQRVMEHFIKLYKKKTGKDVRKDNRAVQKLRREVEKAKFEELNMDLFRSTMKPVQKVLEDSDLKKSDIDEIVLVGGSTRIPKIQQLVKEFFNGKEPSRGINPDEAVAYGAAVQAGVLSGDQDTGDLVLLDVCPLTLGIETVGGVMTKLIPRNTVVPTKKSQIFSTASDNQPTVTIKVYEGERPLTKDNHLLGTFDLTGIPPAPRGVPQIEVTFEIDVNGILRVTAEDKGTGNKNKITITNDQNRLTPEEIERMVNDAEKFAEEDKKLKERIDTRNELESYAYSLKNQIGDKEKLGGKLSSEDKETMEKAVEEKIEWLESHQDADIEDFKAKKKELEEIVQPIISKLYGSAGPPPTGDEESADKDEL

SEQ ID NO: 215 - protein, 715 aa, Sus scrofa
MVADISWHGLGIEQGFLRTMAAVDFHGSYSEAHSTGDFGGDVLSQFEFNFNYLARHWYVPVEDLLEIYKKLYGQSVITKNAIVDCSYLQFLEMYGEMLAISKLYPTFSLKSPFLVEQFQEYFLGGLDDMAFWSTNIYHLTSFMLENGTSDCILPENPLFIACGGQQNNTQGSSQVQKNDFHRNVTGALTKDIEKHINYTKRGVFFSVDSWTSDSLSFMYQSLERSIREMFISSSQPVKQVSSPAASYYLSFPYTRLGWAMTSADLNQDGHGDLVVGAPGYSHPGHIQVGRVYLIYGNDLGLPPVDLDLDKEAHRILEGFQPSGRFGSAVAVLDFNKDGVPDLAVGAPSVGSEKLTYTGAVYVYFGSKYRGIASSPNITISCQDTYCNLGWTLLAADMDGDREPDLVIGSPFAPGGGKQRGIVAAFYSDASHSNKEKLNVEAANWVVRGQEDFAWLGYSLHGVNVNNGTLLLVGSPTWKNASSLAHLFRTRDEKQSLGRVYGYFPPNCQSWFTMSGDKAMGKLGTSLSSGHVMVNGTRTQVLLVGAPTRDDVSKVAFLTMTLHQGGSTWMYELKPDSQPSLLSTFSGDRRFSRFGGVLHLSDLDNDGLDEVVITASLRITDVTSGLMGGEDGRVYVYNGRQITLGDVTGKCKSWITPCPEEKAQYVLISPEAGSRFGSAVVTVRSKTKNQIVVAAGRSSLGARLSGALHIYSLGQD

SEQ ID NO: 216 - protein, 95 aa, Sus scrofa
GIVCYSEWSLPGTRVPPPADPEGGDANLRCVCVKTISGVSPKHISSLEVIGAGPHCPSPQLIATLKKGHKICLDPQNLLYKKIIKKLLKSQLLTA

SEQ ID NO: 217 - protein, 604 aa, Sus scrofa
MKQLKLTGFVIFFFFLTESLTLPTKPQDIDDVRITKKFIEDNVVYITIIAFAQYIQEASFEEVEMLVKAMKEYRDRCLADMTLPECSKLANDVLLENICAMEGLPQKYNFSHCCHKVDFERRLCFLHNKKAEVGFLPPLPTLDPEEKCQTYKTNKESFLNNYIYEVSRRNPFVFAPTLLTVAARFEEMAETCCEEQEKANCFRSKAEPFIQYLKALSSYQKNVCGALLKFGPQILQSINIAVLSQKFPKIEFKQLTSLLEDISSKYDGCCGGDVVHCIRGRSKVMSHICSKQDSISSKIKECCEKKIPERGECIIYSNKDDRPNDLSPREAKFTESENVCEERDADPETFLAEFLYEYSRRHPELSTPELLRIAGVYEDLLRECCNSQTPPDCYKDAEKKFNETTEKSLKIVQRECEHFQNLGKDDLKYHYLARLTKIAPQLSTDELTFLGKEMMIALATCCTLSEEFACVDNLMDLVLGELCGINKNRSINPTVDHCCKTNFAFRRSCFEGLEADKTYVPLPPSQGLFTFPPDLCQAHNEELQRKKDRFLVNLVKLKPELTEEALRSSLIEFTNVVVKCCQAEGPEACFEEEGPKLAAKSQAA

SEQ ID NO: 218 - protein, 607 aa, Sus scrofa
MKWVTFISLLFLFSSAYSRGVFRRDTYKSEIAHRFKDLGEQYFKGLVLIAFSQHLQQCPYEEHVKLVREVTEFAKTCVADESAENCDKSIHTLFGDKLCAIPSLREHYGDLADCCEKEEPERNECFLQHKNDNPDIPKLKPDPVALCADFQEDEQKFWGKYLYEIARRHPYFYAPELLYYAIIYKDVFSECCQAADKAACLLPKIEHLREKVLTSAAKQRLKCASIQKFGERAFKAWSLARLSQRFPKADFTEISKIVTDLAKVHKECCHGDLLECADDRADLAKYICENQDTISTKLKECCDKPLLEKSHCIAEAKRDELPADLNPLEHDFVEDKEVCKNYKEAKDVFLGTFLYEYSRRHPDYSVSLLLRIAKIYEATLEDCCAKEDPPACYATVFDKFQPLVDEPKNLIKQNCELFEKLGEYGFQNALIVRYTKKVPQVSTPTLVEVARKLGLVGSRCCKRPEEERLSCAEDYLSLVLNRLCVLHEKTPVSEKVTKCCTESLVNRRPCFSALTPDETYKPKEFVEGTFTFHADLCTLPEDEKQIKKQTALVELLKHKPHATEEQLRTVLGNFAAFVQKCCAAPDHEACFAVEGPKFVIEIRGILA

SEQ ID NO: 219 - protein, 160 aa, Sus scrofa
MKNSLLFWGVLVIFVEAVFVTAQDEEESTVLVDNKCKCARITSRIIRSAEDPSQDIVERNIRIIVPLNNRENISDPTSPLRTNFVYHLSDLCKKCDLTEVELDNQIVTATQSNLCDDDIETCYAYDRNKCYTNTVPFTYDGQTKMAAQLLILKGSPFPFR

SEQ ID NO: 220 - protein, 489 aa, Sus scrofa
MAGLFLKVFLVGVSSLGCLYPFMDFCFRGETRGQKPNFVIILADDMGWGDLGANWAETKDTANLDKLAAEGMRFVDFHAAASTCSPSRASLLTGRLGLRNGVTHNFAVTSVGGLPLNETTLAEVLQRAGYITGMIGKWHLGHHGSFHPNFRGFDYYFGIPYSHDMGCTDTPGYNYPPCPACPRRHQPSRNLERDCYSDVALPLYENLNIVEQPVNLSGLARKYAEKATQFIQQARASGRPFLLYVGLAHMHVPLSRPQRSAGPWDRRPYAAGLREMDRLVGQIKDKVDRTAKNNTFLWFTGDNGPWAQKCELAGSVGPFLGSWQSRQGGSPAKQTTWEGGHRVPALAYWPGRVPTNVTSTALLSVLDIFPTVVALAGASLPGDRHFDGLDASEVLFGGAPAGHRVLFHPNSGAAGEDGALETVRLERYKAFYVTGGAKACDGSVGPEQHHEPPLIFNLDDDAAEAAPLERGSAEYQRVLPKKQTSDPNC

SEQ ID NO: 221 - protein, 250 aa, Sus scrofa
MERPPLPALLLGAAGLLLLLLPLSSSSSSDACGPCEPATCPPLPPRGCPLGETRDACGCCPVCARGEGEPCGGGGAGRGHCAPGMECVKSRKRRKGKAGAAAGGPGVSGVCVCKSRYPVCGSDGVTYPSGCQLRAASLRAESRGEKAVTQVSKGTCEQGPSIVTPPKDIWNVTGAQVYLSCEVIGIPTPALIWNKVQRGHYGVQRTELLPGDRDNLAIQTRGGPEKHEVTGWVLVKVLSCKPAEYISLRS

SEQ ID NO: 222 - protein, 2883 aa, Sus scrofa
MSCNGGSHPRINTLGRMTRAESGPDLRYEMTCGGIGGGGGGGGGGTSRMYYSRRCTVTEQNSDGYGQTGTMSRHPNQNTIQELLQNCSDCLMRAELIVQPELKYGDGIQLSRSRELDEYFAQANDQMEITDGLIREMRQMGQPCDAYQKRLLQLQEQMRALYKAISAPRVRRASSKGGGGYTCQSGSGWDEFTKRLTSECLGWMRQQRVEMDTVAWGVDMASVEQHINSHRSLHNAIGDYRWQLDKIKADLREKSAIYQLEEEYENLLKASFERMDHLRQLQSIIQAASREIMWINDCEEEELLYDWSDRNTNIAQKQEAFSIRMSQLEVKEKELNKLKQESDQLVLSQHPASDKIEAYMDTLQTQWSWILQITKCIDVHLKENAAYFQFFEEAQSTEAYLKGLQDSIRKKYPCDKNTPLQRLLEQIKELEKEREKILEYKRQVQNLVNKSKKIVQLKPRNPDYRSNKPIILRALCDYKQDQKIIHKGDECILKDNNERSKWYVTGPGGVDMLVPSVGLIIPPPNPLAVDLSSKIEQYYEAILALWNQLYINMKSLVSWHYCMIDIEKIRAMTIAKLKTMRQEDYMKTISDLELHYQEFIRNSQGSEMFGDDDKRKMQTQFTDAQKHYQTLVIQLPGHPQHQTVTTTEITHVGSCQDVNHHQVIELNRETDKQETWILMELQKVRRQMEHCEGRMTLKNILLADQGSSHHITVKINELKSIQNDSQAIAEVLNQLKDMLANFRGSEKYCYLQNEIFGLFQKLENINGVTDGYLNSLCTVRSLLQAILQTEDMLKVYEARLTEEETVCLDLDKVEAYRCGLKKIKNDLNLKKSLLATMKTELQKAQQIHSQTSQQYPLYDLDLGKFSEKVTQLTDRWQRIDKQIDYRLWDLEKQIKQLRNYRDNYQAFCKWLYDAKRRQDNLESMKFGDSSTVLRFLNEQKNLHSEISGKRDKSEEVQKIAELCANSIKDYELQLASYSSGLETLLNIPIKRTMVQSPSGVILQEAADIHARYIELLTRSGDYYRFLSEMLKSLEDLKLKNTKIEVLEEELRLARDANSENCNKNKFLDQNLQKYQAECSQFKAKLVSLEELKRQAELDGKAAKQNLDKCYGQIKELNEKITRLTYEIEDEKRRRKAVEDRFDQQKNDYDQLQKARQCEKESLGWQKIESEKAIQEKEYEIERLRVLLQEEGARKREYENELAKVRNHYNEEMSNLRNKYETEINVTKTTIKELSLQREDDAKSLRGQLDRLSRENRDLKDEIVRLNDSLLQTTEQRRRAQEDALQQKACGSEMLQKKQQLEVELKQVIQQRSEDNARHKQSLEEAARTIQDKNKEIERLKAEFQEEAKRRREYESELAKVRSSYDEEIISLKNQFETEINITKTTIHQLTLQKEEDTSGYRAQIDGLTRENRSLSEEVKRLKNSLAQTTESLRRVEENVQQQKATGLEMSQRKQQLEVELRQVTQMRMEESARYKQSLDEAAKTIQDKNREIERLKQLVETEAKERKCLEEENAQLQRAHGDLQKAHGSATETISKLKVQEQELLRLRMDYERVSQERAARDQDIARFQSSLKELQVQKQKAEEELARLKRAASEDSSKRKKLEEELEAMRRSLKEQAVKVTSLTQQLEQASISKKRSEDELRQQRDVLEGQLREKQRTQDELRRLASEVEALRRQLLQEQENLKQAHMRSEHFQKAIEDKSRSLNESKIEIERLQSLTENLTKEHLMLEEELRNLRLEYDDFRRGHSEVDHGKNATISELRSQLQISNNRTLELQGLINDLQRERENLRQEIEKFQKQALEASNRIQESKSQCTQVVQERESLLVKIKVLEQDKARLQRLEEELNRAKATLEAESRLKQRLECEKQQIQNDLNQWKTQYSRKEEAIRKIESEREKSEREKNTLRSEIERLQAEIRRIEERCRRKLEDSSRETQSQLETERCRLQREIDKLKQRPYGSHRETQTECEWAVDSSKLVFDGLRKKVTAMQLFECQLIDKTTLDKLLKGKKSVEEVASEIQPFLRGAGAIAGASASPKDKYSLVEAKRKKLITPESTVMLLEAQAATGGIIDPHRNEKLTVDSAIARDLIDFDDRQQIYTAEKAVTGFDDPFSGKTVSVSEAIKKNLIDRETGLRLLEAQIASGGVVDPVNSVFLPKDVALARGLIDRDLYRSLNDPRDGQKNFVDPVTKKKVSYMQLRERCRIEPHTGLLLLSVQKRSMSFQGIRQPVTVSELVDSGILRPSTVNELESGQISYDEVGERIKDFLQGSSCIAGIYNETTKQKLGIYEAMKIGLVRPGTALELLEAQAATGFIVDPVSNLRLPVEEAYKRGLVGIEFKEKLLSAERAVTGYNDPETGNIISLFQAMNKELIEKGHGIRLLEAQIATGGIIDPKESHRLPVDIAYKRGYFNEELSEILSDPSDDTKGFFDPNTEENLTYLQLKERCIKDEATGLCLLPLKEKKKQVQTSQKNTLRKRRVVIVDPETNKEMSVQEAYKKGLIDYETFKELCEQECEWEEITITGSDGSTRVVLVDRKTGSQYDIQDAIDKGFIDRKFFDQYRSGSLSLTQFADMISWKNGVTSTGGGGGTGGSVSDDVFSTSRHEAVSKIATIASARNLTIRSSSLSDPLEEWSPIAAIFDTENLEKISVTEGIERGIVDSITGQRLLEAQACTGGIIHPTTGQKLSLQDAVAQGVIDQDMATRLKPAQKAFIGFEGVKGKKKMSAAEAVKEKWLPYEAGQRFLEFQYLTGGLVDPEVNGRISTEEAIRKGFIDGRAAQRLQDTSSYAKILTCPKTKLKISYKDAINRSMVEDITGLRLLEAASVSSKGLPSPYNVSSAPGSRSGSRSGSRSGSRSGSRSGSRRGSFDATSNSSYSYSYSFSSSSIGH

SEQ ID NO: 223 - protein, 463 aa, Sus scrofa
MPTQRQAPQLLLLPLLLLTLPATGSDPVLCFTQYEESSGKCKGLLGGGVSLEDCCLNADYAFQETSSKFCMPCRPPQWSPWSAWAPCSVTCTEGSQLRHRRCVGWGGQCPENVELGTLQWQLQACENQPCCPEMGGWSSWGPWAPCSATCSRGTRTRRRACDRPTPKCGGHCPGEAQESEDCDTQQVCPTHGAWAAWGPWGPCQSTCKGGPSEPVERRKRTCTAPEPSTKPPGNPCSGSANDQRMCSGLPPCPVAGGWGPWGAVSPCPVTCGLGQTREQRSCDHPVPQHGGPFCVGEAFRTHICNTAVPCPVDGEWGLWGEWSNCVRRGIKHISCQEIPGQQTRSRICKGRKFDGRRCLGEQQDIRHCYSIQRCPLKEASWSEWSTWGLCIPPCGPSPVRTRQRLCQPKLPNFPPTITPVEGQGEKNVTFWGKPLVKCDVLQGQHMMVEEKRPCLHAPPCNEP

SEQ ID NO: 224 - protein, 446 aa, Sus scrofa
MTWSSHPRSLIILSFYTLSMLSSTCLAYVATRENCCILDERFGSYCPTMCGIAGFLSTYQNTVEKDLQNLEGILHQVENKTSEARELIKAIQISYNPEDLSKPDRIQSATKESKKMLEEIMKYENLITTHDSTIRFLQEIYNSNNQKISNLKQKVIQLEAKCQEPCKDTVKIHDTTGKDCQEIANKGARESGLYFIKPLKAPKKFLVYCEIDGSGNGWTVFQKRVDGSEDFKKNWIQYKEGFGHLSPTGTTEFWLGNEKIHLITTQSAIPYVLRVQLEDWSGKTSTADYSTFRVGPESDKYRMTYAYFLGGDAGDAFDGFDFGDDSSDKFLTSHNGMQFSTWDNDNDKFDGNCAEQDGSGWWMNKCHAGHLNGVYYPGGTYSKSSTPNGYDNGIIWATWKSRWYSMKKTTMKLIPYNRIAIEDGQQHSLGGAKQVRPDHHVEIEYD

SEQ ID NO: 225 - protein, 667 aa, Sus scrofa
MFSVRLFCLVLTVVGTVQMAEVQDKGEFLAEGGGVRGPRLTERHQSACKESDWPFCSDEDWNIKCPSGCRMKGLIDEVNQDFTNRINKLKNSLFDYQKNNKDSSTLSRNIIELLRGDFSNANNNDNIYSQVSEELRSRIEILKRKVLEKVQHIHLLQKNVRDQLIEMKRLEVDIDIKIRSCKGSCSRALEHKVDLKDYENQQKQLDQVIAINLLPSRDRQYLPLIKISPLPDITPADFKTQARETPPEWKALLETRQVKMVLERVGGDERTRGGSISHGPGSVPGTGSPGGLKPGSYGPGGPGTWKPGRPEPGSTGTWDSGHPDPGSAGTWKPGRPEPGSTGTWDSGHPDPGSAGTWKPGRPEPGSTGTWDSGRPDPGSAGTWKPGRPESGSTGTWHSEHLEHGSSSTWHSGQHEHGSVGSWKPGSSGSGSLRPDSSGPGDTTPSNPDWGTFKEVSGSVSPGTKSEVHTSKLVTSKGDKDIVIGKEKVTSGHTSTTHRSCSKTITKTVTKADGRTETIKEVINSEDGSDCGGTDVEFAHMLPGKGSLDEFFHRHRDETSLSRDPFPDFFSPVLKEFDGKTHPGGPGSDLAGFFHPDGPEYSSSSKISSHSKQTITKTINREGGAVESKSYKMEDEADSEEGLDLKGGHVIKRVYTRTRPARGIRTSP

SEQ ID NO: 226 - protein, 260 aa, Sus scrofa
MSHHWGYDKHNGPEHWHKDFPIAKGDRQSPVDINTSTAVHDPALKPLSLCYEQATSQRIVNNGHSFNVEFDSSQDKGVLEGGPLAGTYRLIQFHFHWGSSDGQGSEHTVDKKKYAAELHLVHWNTKYKDFGEAAQQPDGLAVLGVFLKIGNAQPGLQKIVDVLDSIKTKGKSVEFTGFDPRDLLPGSLDYWTYPGSLTTPPLLESVTWIVLREPISVSSGQMMKFRTLNFNKEGEPEHPMVDNWRPTQPLKNRQIRASFQ

SEQ ID NO: 227 - protein, 513 aa, Sus scrofa
MSCSTRVSSSRARGSSSVRVSAGGSSFSSGSRCGLGAGSAPGFRGGAGSCGLSGGSSSGFGGSFRGGFGSCSVAGGFGGASGSVAGYGGGSGFGGGSGFGGGSGFGGGSGFGGGSGFGGGASGGFYSYGGGLGGGVGDGGLFSGGEKQTMQNLNDRLANYLDKVRALEEANADLEHKIKEWYDKFGPGSRDVGSGRDYSKYYPIIDDLRKQITAATIENAGIVLQIDNARLAADDFRLKYENELYLRQSVEADINGLRKVLDDLTMTRSDLEMQMENLVEELTYLKKNHEEEMKSMQGSSGGDVTVEMNAAPGTDLTKLLNDMRAQYEELAEQNRREAEEQFKKQSASLQAQISTDAGAASSAKNEITELKRTLQALEIELQSQLVMKSSLEGTLADTEAGYMAQLSQIQIQISSLEEQICQIRGETECQNAEYEQLLDIKTRLEMEIETYRRLLDGEGGNSGSRNTGSRNIGSRDSSVSDPSKSRVTKTIVEEVVDGKVVSSQVKMKLSVPI

SEQ ID NO: 228 - protein, 1466 aa, Sus scrofa
MTSFVQKGTWLLFALLHPTVILAQQQEAIEGGCSHLGQSYADRDVWKPEPCQICVCDSGSVLCDDIICDDQELDCPNPEIPFGECCAVCPQPPTAPTRPPNGHGPQGPKGDPGPPGIPGRNGDPGLPGQPGSPGSPGPPGICESCPTGGQNYSPQYESYDVKAGVAGGGIGGYPGPAGPPGPPGPPGVSGHPGAPGSPGYQGPPGEPGQAGPAGPPGPPGAIGPSGPAGKDGESGRPGRPGERGLPGPPGLKGPAGMPGFPGMKGHRGFDGRNGEKGDTGAPGLKGENGLPGENGAPGPMGPRGAPGERGRPGLPGAAGARGNDGARGSDGQPGPPGPPGTAGFPGSPGAKGEVGPAGSPGPSGSPGQRGEPGPQGHAGAAGPPGPPGSNGSPGGKGEMGPAGIPGAPGLMGARGPPGPPGTNGAPGQRGAAGEPGKNGAKGEPGPRGERGEAGSPGIPGPKGEDGKDGSPGEPGANGLPGAAGERGMPGFRGAPGANGLPGEKGPAGERGGPGPAGPRGVAGEPGRDGVPGGPGLRGMPGSPGGPGSDGKPGPPGSQGESGRPGPPGSPGPRGQPGVMGFPGPKGNDGAPGKNGERGGPGGPGLPGPPGKNGETGPQGPPGPTGPGGDKGDTGPPGQQGLQGLPGTSGPPGENGKPGEPGPKGEAGAPGIPGGKGDSGAPGERGPPGAVGPSGPRGGAGPPGPEGGKGPAGPPGPPGAAGTPGLQGMPGERGGSGGPGPKGDKGDPGGSGADGAPGKDGPRGPTGPIGPPGPAGQPGDKGESGAPGLPGIAGPRGGPGERGEHGPPGPAGFPGAPGQNGEPGAKGERGAPGEKGEGGPPGIAGQPGGTGPPGPPGPQGVKGERGSPGGPGAAGFPGGRGLPGPPGSNGNPGPPGSSGPPGKDGPPGPPGSSGAPGSPGVSGPKGDAGQPGEKGSPGPQGPPGAPGPGGISGITGARGLAGPPGMPGARGSPGPQGVKGENGKPGPSGLNGERGPPGPQGLPGLAGAAGEPGRDGNPGSDGLPGRDGAPGSKGDRGENGSPGAPGAPGHPGPPGPVGPAGKNGDRGETGPAGPAGAPGPAGSRGAPGPQGPRGDKGETGERGANGIKGHRGFPGNPGAPGSPGPAGHQGAVGSPGPAGPRGPVGPSGPPGKDGASGHPGPIGPPGPRGNRGERGSEGSPGHPGQPGPPGPPGAPGPCCGGGAAAIAGVGGEKAGGFAPYYGDEPMDFKINTDEIMTSLKSVNGQIESLISPDGSRKNPARNCRDLKFCHPELKSGEYWVDPNQGCKMDAIKVFCNMETGETCISASPSTVPRKNWWTDSGAEKKYVWFGESMNGGFQFSYGNPELPEDVLDVQLAFLRLLSSRASQNITYHCKNSIAYMEHASGNVKKALRLMGSNEGEFKAEGNSKFTYTVLEDGCTKHTGEWGKTVFEYRTRKAVRLPIVDIAPYDIGGPDQEFGADIGPVCFL

SEQ ID NO: 229 - protein, 643 aa, Sus scrofa
MEVIVLFRIISFRQAVYFMCLFAAVSCGCLPQLHKNTFFRGGDVSAMYTPSARHCQMMCTFHPRCLLFSFLPADSTSVTDKRFGCFLKDSVTGMLPRVLRKNAISGHSLKQCGHQIRACHRDIYKGIDMRGVNFNVSKVKSVEECQKRCTNSIHCLFFTYATQAFNNAEYRNNCLLKHSPGGTPTSIKVLANVESGFSLKPCADSEIGCHMDIFQHLAFSDVDVARVIAPDAFVCRTICTYHPNCLFFTFYTNAWKIESQRNVCFLKTSHSGTPSSPTPQENAISGYSLLTCKQTLPEPCHSKIYSEVDFEGEELNVTFVQGANLCQETCTKTIRCQFFTYSLHPEDCRGEKCKCSLRLSSDGSPTKITHGMRASSGYSLRLCRSGDHSACATKANTRIVGGTDSFLGEWPWQVSLQAKLRAQNHLCGGSIIGHQWVLTAAHCFDGLSLPDIWRIYGGILNISEITKETPFSQVKEIIIHQNYKILESGHDIALLKLETPLNYTDFQKPICLPSRDDTNVVYTNCWVTGWGFTEEKGKIQNILQKVNIPLVSNEECQKSYRDHKISKQMICAGYKEGGKDACKGDSGGPLVCKYNGIWHLVGITSWGEGCARREQPGVYTKVIEYMDWILEKTQDDDGQSWMK

SEQ ID NO: 230 - protein, 339 aa, Sus scrofa
MSTVHEILCKLSLEGDHSTPASAYGSVKAYTNFDAERDALNIETAIKTKGVDEVTIVNILTNRSNEQRQDIAFAYQRRTKKELASALKSALSGHLETVILGLLKTPAQYDASELKASMKGLGTDEDSLIEIICSRTNQELQEINRVYKEMYKTDLEKDIISDTSGDFRKLMVALAKGRRAEDGSVIDYELIDQDARDLYDAGVKRKGTDVPKWISIMTERSVCHLQKVFERYKSYSPYDMLESIKKEVKGDLENAFLNLVQCIQNKPLYFADRLYDSMKGKGTRDKVLIRIMVSRSEVDMLKIRSEFKRKYGKSLYNYIQQDTKGDYQKALLYLCGGDD

SEQ ID NO: 231 - protein, 613 aa, Sus scrofa
MHQRRKVSVKHQVMDFPRALITIFHGKGTMASWPFSRRWRVSDPILFQVTLAAALLATVLGKCGPPPYLQFASPISELNETEFETGTTLKYNCRPGYRKITAKNHVLTCESRGTWNYIEFCVKKQCGNPGELLNGQVKVKTDYSLGSQIEFSCSEGYVLVGPTTSYCEIQEKGVGWSEYLPRCMIVKCEPPPAISNGKHNGGDEDFYTYGSSVTYSCDSDFSMLGKASISCSVENETIGVWSPSPPICKKINCLQPVVKNGKITSGFGPIYAYKESILFGCDKGFRLKGSNLIHCEADSNWSPPPPICELHGCAGLPNIPHATWRRYSYSLPTEEVYGVDTVMSYYCLSGYRPKTSGSLTVTCQEDFKWSSYIECVEVCCPVPDVDHISITYRKKNQSANHCTYYSGDKISYTCNNNEKVRYVSSCSEQGTWRPRMPVCDRGCDNPPVVAHGHHTQIITLFGIKKDEVVYKCDEGYTLVGEDRLFCHYSRWSPAAPRCKAQCLKPVIDHGKLSVDQDKYTESEIITVQCDSGYGLVGPQNITCIEDRTWHPQVPKCEWEYPEDCEQVHEGKKLMQCLPNPEEIKLALELYKLSLEIKLLKRQIDEKADLESSV

SEQ ID NO: 232 - protein, 257 aa, Sus scrofa
MFFWFMCYLVVVWLISASDAQSCPELPAVDNSIFVAKEGEGQILGTYFCINGYHLVGEKTLFCNSSQEWNAPAPECRLGHCPDPVLGNGEFSHLETVNVNDTITFKCNEHYILKGSNWSRCREDHTWVPPFPICKSKDCGPPENPIHGYFEGIDFNSGSTITYYCKARYRLVGTQHQQCIDGEWSGAIPVCELIPEAPKTALQIEFEKALLAFQESEELCKATENFMQRLKKSGLTMEELKYSLEIKKAELKAKMLL

SEQ ID NO: 233 - protein, 443 aa, Sus scrofa
MSTTFLQTSSSTFGGGSTRGGSLLAGVGGFGGGSLYGGGGSRSISVSSSRFVSSGSGGGFGGGAGSGLGGGFGGGLGGGLGGGFGGGFAGSFGGGFGDFGGGNGGLLAGNEKITMQNLNDRLASYLDKVRALEEANADLEVKIHDWYKKQSPSSPERDYSPYFKTMEELRDKIRAAAIDNSRVILEIDNARLAADDFRLKYENELALRQGVEADINGLRRVLDELTLTKTDLEMQIESLNEELAYLKKNHEEEMKEFSNQLAGQVNVEMDAAPGVDLTRVLAEMREQYEAIAEKNRRDAEAWFFSKTEELNKEVASNTEMIQTSKTEITDLRRTVQGLEIELQSQLSMKAGLESSLAETECRYATQLQQIQGLIGGLETQLSELRSEMECQNQEYKILLEGQDARMAGIGTREASLGGGGGKVRINVEESVDGKVVSSRKREI

SEQ ID NO: 234 - protein, 473 aa, Sus scrofa
MATCSRQFTSSSSMKGSCGIGGGSSRISSVLGGGSYQAPSAYGGLSVTSSRYSSGGVCGLGGGYGGGFSSSSSFGGALGSGFGGGYGGGLGAGFGGGFGGGFGGGFGGGDGLLVGSEKVTMQNLNDRLASYLDKVRALEEANADLEVKIRDWYQRQRPAESKDYSPYFKTIEDLRNKILTATVDNANVVLQIDNARLAADDFRTKYETELNLRMSVEADINGLRRVLDELTLARADLEMQIESLKEELAYLRKNHEEEMNALRGQVGGDVNVEMDAAPGVDLSRILNEMRDQYEKMAEKNRKDAEDWFFSKTEELNREVATNSELVQSGKSEISELRRTVQNLEIELQSQLSMKASLENSLEETKGRYCMQLAQIQELISGVEEQLAQLRCEMEQQNQEYKILLDVKTRLEQEIATYRRLLEGEDAHLSSSQFSSGSQSSRDVTSTRQIRTKVMDVHDGKVVSSHEQVLRTKN

SEQ ID NO: 235 - protein, 100 aa, Sus scrofa
MKLLAIAVLLFTICSLEGALVRRQAEEPCLQSLVSQYLQTVTDFGKDLIEKAKGSELQTQAKTYFEKTQEQLTPLVKKAGTDIFNFLSSFIGLKTQPTAQ

SEQ ID NO: 236 - protein, 746 aa, Sus scrofa
MQAKKRYFILLSAGSCLALLFYFGGLQFRASRSHSRREEHSGRNGLHHPSPDHFWPRFPDALRPFVPWDQLENEDSNVHTSPRQKRDANSSIYKGKKCRMESCFDFTLCKKNGFKVYVYPQQKGEKIAESYQNILAAIEGSRFYTSDPSQACLFVLSLDTLDRDQLSPQYVHNLKSKVQSLHLWNNGRNHLIFNLYSGTWPDYTEDVGFDIGQAMLAKASISTENFRPNFDVSIPLFSKDHPRTGGERGFLKFNTIPPLRKYMLVFKGKRYLTGIGSDTRNALYHVHNGEDVVLLTTCKHGKDWQKHKDSRCDRDNTEYEKYDYREMLHNATFCLVPRGRRLGSFRFLEALQAACVPVMLSNGWELPFSEVINWNQAAVIGDERLLLQIPSTIRSIHQDKILALRQQTQFLWEAYFSSVEKIVLTTLEIIQDRIFKHISRNSLIWNKHPGGLFVLPQYSSYLGDFPYYYANLGLKPPSKFTAVIHAVTPLVSQSQPVLKLLVAAAKSQYCAQIIVLWNCDKPLPAKHRWPATAVPVIVIEGESKVMSSRFLPYDNIVTDAVLSLDEDTVLSTTEVDFAFTVWQSFPERIVGYPARSHFWDNSKERWGYTSKWTNDYSMVLTGAAIYHKYYHYLYTHYLPASLKNMVDQLANCEDILMNFLVSAVTKLPPIKVTQKKQYKETMMGQTSRASRWADPDHFAQRQSCMNTFASWFGSMPLIHSQMRLDPVLFKDQVSILRKKYRDIERL

SEQ ID NO: 237 - protein, 954 aa, Sus scrofa
MCESCQRPASNGIIVPRDSGPLTTSALEKSQKQTAQCKQEQPGAAVPGQSSERRPSPQRPGRSSPADGRSMSRRADRVISLFTFAVGVNICLGFTANRIKRAEGWEEGPPAVLSDSPWTNTSGSCKGRCFELQEAGPPDCRCDNLCKSYSSCCHDFDELCLKTAGGWECTKDRCGEVRNEDNACHCSEDCLAGGDCCTNYQVVCKGESHWVDDDCEEIKAPECPAGFVRPPLIIFSVDGFRASYMKKGSKVMPNIEKLRSCGTHSPYMRPVYPTKTFPNLYTLATGLYPESHGIVGNSMYDPVFDATFHLRGREKFNHRWWGGQPLWITATKQGVKAGTFFWSVVIPHERRILTILQWLTLPDNERPSVYAFYSEQPDFSGHKYGPFGPEMTNPLREIDKTVGQLMDGLKQLKLHRCVNVIFVGDHGMEDVTCDRTEFLSNYLTNVDDITLVPGTLGRIRPKFSNNAKYDPKVIMANLTCKKPDQHFKPYMKQHLPKRLHYANNRRIEDIHLLVERRWHVARKPLDVYKKPSGKCFFQGDHGFDNKVNSMQTVFVGYGPTFKYKTKVPPFENIELYNVMCDLLGLKPAPNNGTHGSLNHLLRTNTFRPTMPEEVTRPNYPGIMYLQSDFDLGCTCDDKVEPKNKLEELNKRLHIKGSTEAETRKFRGSKNEIKENVNGNFEPRKERHLLYGRPAVLYRTRYDILYHNDFESGYSEIFLMPLWTSYTVSKQAEVSGIPEHLTSCVRPDVRVSPSFSQSCLAYKNDKQMSYGFLFPPYLSSSPEAKYDAFLVTNMVPMYPAFKRVWNYFQRVLVKKYASERNGVNVISGPIFDYDYDGLHDTQDKIKQYVEGSSIPIPTHYYSIVTSCLDFTQPADKCDGPLSVSSFILPHRPDNEESCNSAEDESKWVEELIKMHTARVRDIEHLTSLDFFRKTSRSYPEILTLKTYLHTYESEI

SEQ ID NO: 238 - protein, 1660 aa, Sus scrofa
MDVPWPLGLILLLLGAQVVHAEPLYMLVTPRVLRVSSPENIHVQAHSDSGEPLTRPLEVNLTVWDFPMKKTIVARSQLILSPENNFMDQTPVTIPKKLVYPPQPGTQYVIIQARWAPTSVSSSMEKLVLVAPHAGYIFIQTDKTIYTPEHLVQYRVYTVDHKMDPVTRTFTLDIKNPQGVTVISQDFQAKDGVLASSFPLPELISLGTWSIEASYQSAPKQKFKAAFEVKEYVLPSFEVQLKPNKTFFYLNDYALGVNIQAQYIFNKPVNGHALAIFGVKLDSRQISIQKSLRRVEISEGQGHVTLQKDTLMAEFQGPEEDFIGASIFVNVTVFSSGGEMVQAETSGVKIVRSPYNIKFTRTPQYFKPGMPFHFRVFVSNPDGSPASRVLIRFKDHRVHTSSSGVATLTINTNANMQELPIQVETDEPLRPEEQASATMTAWPYSTQDNSGNFLHIEVKTLGTEVGSNIQLSLNTRHQNPATKNQIRYFTIMVLSKGRIVYAKHQVKSQGSVYTSAIIDVTSEMLPSFRIVAFYLLPRGRGQDPELVADSIWIDVNDRCMGTLKVGMKNEGYLQPVQPSSRVEVKVTGDAEATVGLVAVDKAVYVLNSKHKLTQKKVWDTVEEHDIGCTAGSGKDRLAVFKDAGLDMKMSTGMDTLASSDWQCPKTSPPTRQRRSLKRLETKRNAVNKFETELERKCCEAGLRESPAGLSCGERTRHVRYGPDCVAAFLSCCRLSEALTREAREEQLLLGTMDEDEDFDDIFLEDQPVRSLFPESWFWRKITLPQSESGISDLITSVTVPDSITTWQFVAISVKAGQGLCVSDPFELTVTKWFFVDLKLPFSVIRNEQVQIQAVLYNFMTNPVKVRVEFPYKESLCSAAKPGAPSRQVVTVPPTSSKMVPFVLLPLEIGKVDVEVRAGAFGIQDHVRKTLLVQAGGQIKQVSHSIFLNPQGQTQTELVPKQEILDKTPNTEAEVFVSVQGDILAETILGSLTPRETQRLLRVPTGCPEQTLSSLTPAIILTRYLDATGQWNKVGVEHREMVMKNIVSGYSRMLTHRSADGTYHTSKGNPGSTWLTSYVFRVFALAYPIMSFSVLDLPSLCGLAKWIINQRQERDGSFSEEGPVVMASMQGGYQGSEADVSLTALVLIALNEGKELCHQEIPNLEARMKKATGFLEEKLFQIQTTFAIAIVSYALALSRSPRANDRLDRFASLDKTYWPVDDLNKNSLYSIEATAYALMQKLELGRLNETFAIAKWLLEMRELGGGFQSTQTTVVAIEALTRYSEAVPFDGIQNLHVQIKAPKRALNVQWSIDENNAYQLRSAKFSAQDDLEIKASGSGRGTISILTMYYRSPEFWKDTCNLYHLNVTLHTAQEENKKGEETFQLRMKTRFQGYREATMTIMEVSLLTGFYPNQDDLKQLTSEVERYAFQYETKTTTSDSTVVLYLEKLSHKEDTVLGFRIHRMLQAEFLQSAQVTVYDYYEPSRRCSSFYNLPTEDSSLRKICHKDVCRCAEEQCPSPKKDSNHVRQEELQVAACEIGVDFVYKARLESVEASTSNPYIYYNMQLQAIIKSGTDSVKSLTMKKFVSHTTCHDSLGLEENETYLIMGQTSDLWRVKSEYTHVLGKETFLMHWPAEGTAGKKELLDQLEGFSEYMRTHGCES

SEQ ID NO: 239 - protein, 349 aa, Sus scrofa
MSATGLSPVRCAFVLLLALCSRPASGQDCSGQCQCAAGKAPRCPAGVSLVLDGCGCCRVCAKQLGELCTERDPCDPHKGLFCDFGSPANRKIGVCTAKDGAPCVFGGTVYRSGESFQSSCKYQCTCLDGAVGCVPLCSMDVRLPSPDCPFPRRVKLPGKCCEEWVCDEPKDHTVVGPALAAYRLEDTFGPDPTMMRANCLVQTTEWSACSKTCGMGISTRVTNDNAFCRLEKQSRLCMVRPCEADLEENIKKGKKCIRTPKISKPVKFELSGCTSVKTYRAKFCGVCTDGRCCTPHRTTTLPVEFKCPDGEVMKKSMMFIKTCACHYNCPGDNDIFESLYYRKMYGDMA

SEQ ID NO: 240 - protein, 329 aa, Sus scrofa
MRCYHICKVPGRVMGIRVLRFSLVVILVLLLVAGALTTLLPNIKEDKMLALRREIKSQGKSPLDSFTLIMQTYNRTDLLLRLLNHYQAVPNLHKVIVVWNNVGEKGPDELWNSLGPHPVPVIFKPQTANRMRNRLQVFPELETSAVLMVDDDMLISAQDLVFAFSVWQQFPDQIVGFVPRKHVATASGVYSYGGFELHTPGFGNGDHYSLVLIGASFFNSKYLDLFQRQPAAVHALLDETQNCDDIAMNFLIAKHTGKTSGVFVKPVNMYNLEKETNGGYSGMWHRAEHFLQRSYCINKLVHIYDSMPLRYSNIMISQFGFLIFKFFFF

SEQ ID NO: 241 - protein, 550 aa, Sus scrofa
MPMLACCGHTKPLKRKHDALLLAASSVSEAGKTHWTPENYEYSYENYNQEENSSAPAHHENPDWYYTEDDPCLSNPCAHGGDCLVSGDTFTCSCPAPYSGNRCQKVQNKCKNKPCGRGECLITQSPPYYRCACKHPYRGPDCSTVVPVCRPNPCQNGGTCSRHRRRSKFTCTCPDQFKGRFCEIGSDDCYVGDGYSYRGEVSKTVNQHTCLYWNSHLLLQENYNMFMEDAEAHGIGEHNFCRNPDGDRKPWCFIKVSSAKVKWEYCDVPACSAPEGSPIEPVTELPGFDSCGRTETAERKFKRIYGGFKSTAGKHPWQASLQTSLHLTVSMPQGHFCGGALIHPCWVLTAAHCTDIKAKYLKVVLGDQDLKKTELHEQSFGVEKIFKHSRYREKDDIPYNDIALLKLKPVDGHCALESKYVKTVCLPDSPFPSGTECYISGWGVTETGEGSRQLLDAKVKLISNAVCNSRRLYDHMLDDNMICAGNLQKPGQDSCQGDSGGPLTCEKDDAYYVYGIVSWGLECGKKPGVYTQVTTFLNWIRATMEREASF

SEQ ID NO: 242 - protein, 1177 aa, Sus scrofa
MRCPAKFVWLILWTVCVAEDCREPPPRKETEIVSGSWTEQTYPEGTQATYKCRPGYRTLGSIVMVCKDGKWVSLHPSRICRKKPCGHPGDTSFGSFHLAVGTQFEYGAKVVYTCDEGYQMLGEINFRECDTNGWTNNIPLCEVVKCLPVTEPENGRIVSGALEPDQEYTYGQVVQFQCNAGYSLDGPKQIHCSAGGVWSGDKPKCVEITCDPPHIPNGFYTPESNRYRTGDRITYHCKEGFYPEIQGNVARCTGNHWSPAPRCTLKPCSRPVIKHGKLYYDYRGYFPANVGQYFYYYCDHNFVTPSRRSGDYLTCKRNGWSAEVPCLRQCIFDYLEHGHNSYSAKKYLQGETVRVQCYPGYSLPDNQDTLLCTENGWSPPPKCILVKTCAKSDIEIENGFFSENIFTYPLNKQTQYKCKPGYVTADGATSGLITCLQSGWSARPVCIKSCDAPVPENARIKSDGTWFKLNDTVDYECQQGFESRNGDTAGSIVCGEDGWSDKPACYERECITPGIKSYLDAEPKHNKFKVGGVLKFHCRERRVMLGADSVQCYHFGWSPNLPTCKAGQVKSCAPPPQLLNGEVKETQKGEYQHSEVVEYVCNPRFLMKGSHKIQCVDGEWTTLPVCIEEERTCGDIPDLDHGYVRHSAPPYHHGDSVEFGCNASFSLVGPRSITCISGKWTQLPQCFATDKLKKCKASKIFASEGNLLDKTEFDHNTNQSYKCRGKSESKYSVCINGVWDPRVSCKEEVLNSCPPPPQIPNAQDMTTTVNYKDGEKISILCQENYIIQDGEEIVCKDGRWQSVPRCVEKIPCSEPPEIDHGTIQSPGSAEERREMFEPKKYAHGTRLSYTCEDGFEISEKEIICHMGKWSSLPQCVGRPCAPPPEIQNGAVAQEKDSYLYGEEVTYSCDEGFGIDGPASIRCLGEKWSHPPECINTDCFDLPTFNDAVVIGPKKPSYKSGEQVTFKCLQYFQLEGPNTIRCIKSRWIGKPACRDVSCVNPPSVENAVILDKRSRYQPGERARYECIEPYALYGDVEVMCFNGSWTKPPQCKDSKGKCGPPPPIDNGDTTSFPLPVYPPGTVVEYQCQSYYELEGSSSIKCENGQWSEPPKCLDACVVSEEMMRKHNIELKWRPDKKLYSRTDDTIEFRCRQGYYRRTPLHTFRATCQQGKVAYPTCG

SEQ ID NO: 243 - protein, 741 aa, Sus scrofa
MGSCGRGSGPPLSLLLLAVLLAVPGAGAAPRSALYSSSDPLTLLQADTVRGAVLGSRSAWAVEFFASWCGHCIAFAPTWKALANDVKDWRPALNLAALDCAEETNNAVCREFDIPGFPTVRFFKAFSRTGSGATLPVAGADVQTLRERLIDALETHSDTWPPACPPLEPARLEEITGFFARNSEEYLALIFEKEGSYLGREVALDLSQRQGIAVRRVLNTERNVVSKFSVTDFPSCYLLFRNGSFSRVPVLMESRSFYTAYLQRLSGVIRKPVPTTTVPTTTRTVAPTVWKVADPSKIYMADLESALHYILRVEVGKFSVLEGQRLVALKKFVAVLAQYFPGQPLVQNFLHSVNDWLKKQPRKKIPYGFFKTVLDNRKEGAVIADKVNWVGCQGSEPHFRGFPCSLWILFHFLTVQASRQSVDPSQETAKAQEVLQAIRGYVRFFFGCRDCAAHFEKMASGSMHRVGSPNSAVLWLWSSHNKVNARLAGAPSEDPQFPKVQWPPRELCPACHNELRGAPVWDLGNSLNFLKTHFSPSNIVLDLPSARLGPQRGAQRMAVNPEQVELELAAGNFTLGPPEKVEIMLGPGTESPGATIPDVPAEEPGASHPQERQDPPEYIAELQRDELEQPVGQQRLTRRDTGAVLLAEFLAEKTLPRGPSELRRVGRSSKQLASIPDGEPKPGAMPGRGQWLQVLEGNFSHLDISLCVGLYSLSFMGLLAAYTYFRARIRALKGHASHPAA

SEQ ID NO: 244 - protein, 589 aa, Sus scrofa
MLAVAFFILSLMTCQPGVTIQEKVNRRVSRAVLSSTPTAVSCQLSNWAEWTECFPCQDKKYRYRSLLQPNKFGGAICSGNVWDQASCHSPTECLRQAQCGQDFQCKETGRCLKRHLVCNGDRDCLDGSDEDDCEDVRIFEDDCSQYDPIPGSERATLGYNILTQEETQSVYDARYYGGQCETVYNGEWRELRYDSACERLYYGDDEKYFRKPYNFLKYHFEALADSKFSSESYDDANDLLKKVKNEKSVSAGVTVGIGPTGSPFTANVGLSGSRESAFLNKLSKYNEKKYSFIRIFTKVQTASFKMRRDNIMLDEVMLQSLMELPEQYNYGMYAKFIDDYGTHYITSGSMGGVYEYILVLNKENMTKSGVTSDDVTSCFGGSFGIDYDYTDNLQITGSLSGKHCKKLGGGHREDEESNMAVEDIISRVRGGSSGWGGGLTQNGSIITYRAWGRSLKYNPAVIDFEMKPIYEILRHTNLGPLEAKCQNLRRALDQYLMEFNACRCGPCFNNGEPILVGTSCRCQCPVGYQGLACEQMKSEGAKADGRWSCWSSWSACRLGTQERRRECNNPAPQNGGASCSGHIVQTQAC

SEQ ID NO: 245 - protein, 610 aa, Sus scrofa
MSLSQISCRIEKMKTSGTWAWRMPAKLFLLCAALGCLSLPGSRGERPHSLESNAVNESLGKSRQTRSVDVTLTPIDCELSSWSSWTTCDPCQKKRYRHASLLRPSQFHGEPCNFSDKEVEDCVSNRPCRSQVRCEGFVCAQTGRCINRRLLCNGDNDCGDQSDEANCKRIYKKCQQEMDQYWAIGSLASGINLFTNNLEGPVLDHRYYAGACSPHYILNTRFRKPYNVENFNPQTQGKYDFALTEYESYSDFEQNVTTAAISKSSFSFGFKISGMFEFGISSTSDKGKRFISRTKRFSHTKSTFLHARSDLEVARYKLKSRNLMLHYEFLQRVKQLPLEYSYGEYRDLFRDFGTHYITEAVLGGVYEYTLIMNKEAMERADYSLKDVHACAQHGFKIGVAIEEVYIKLGVSVHKCKDILNEIKDRNKRSSMVNDLVVLVRGGASEHITALAYKDLPTADLMQEWGDAVQYNPDIIKIKAEPLYELVTAADFAYSSTVKQNMKRALEEFEKEISSCHCAPCQGNGVPVLKESRCDCICPAGFQGSACEVTNRKNVPIDGKWNCWSDWLRVLEDVKQDEGSATIHLLKMGAAPAWVLLQKHLTVKEGRASSG

SEQ ID NO: 246 - protein, 489 aa, Sus scrofa
MPAVQLLLLACLVWSAGARTAQLWKANDQSGQCQYTFKVASPNESSCPEQGQTMSALQDLQRDSSEQRAALESTKARLSSLEALLHRLILGQATGPWEAQEGLEKELGTLRREREQLETQNRELETTYNNLARDKSALEEEKRQLETENEDLARRLESSSQELAKLKVQCPQAHSMSQDVPLGSREVSKWNVENLDFQELKSELTEVPAARILKESVSGHSGSEEGGSGCGELVWVGEPVTLRTAETITGKYGVWMRDPKATYPYTQETTWRIDTVGTDIRQVFEYDRISQFAQGYPSKVHVLPRRLESTGAVVYQGSLYFQGASSRTVIRYELSTETLKAEKEIPGAGYHGQFPYSWGGYTDIDLAVDETGLWVIYSTEAAKGAIVLSKLNPENLELERTWETNIRKQSVANAFIICGTLYTVSSYSSPEATINFAYDTSTGSSKALTIPFKNRYEYSSMIDYNPLEKKLFAWDNFNMVTYDIRLSRM

SEQ ID NO: 247 - protein, 632 aa, Sus scrofa
MGRWAWVPSPCPPPRLSLLLLLLLLVPRGAQPQAGRNQTEAPAQKATVTPGTPLIPVTSATLRPPATRAPKAEGPHGGGLTPLPRAAPSNSSAGGTVLTEAGQPCRFPFRYGGRMIHSCTSEGSAHRKWCATTHNYDRDRAWGYCVQASTPWEGPAALDPCASGPCLNGGSCSSTQDPESYHCTCPVDFAGKDCGSEKCFDESRYEYLEAGDRWARVHEGRVEQCECAGGQVRCQGTRHTACLSSPCLNGGTCHLIVATGTTVCACPPGHAGRLCNIVPAQSCFVGSGTEYRGVASTAASGLSCLAWNSDLLYQELHVDSVGAAALLGLGPHAYCRNPDKDERPWCYVVKDSALSWEYCRLAACESLARIQPLPPEVLLTLPEPTAAGPAGRQNCGKRHKKRTFLRPRIIGSLVHTCWVVSAAHCFANSPPRESVSVVLGQHFFNRTTDVTQTFAIVKYIPYPLYSVFNPSDHDLVLIRLEKKGERCAVRSQFVQPICLPEPGSPFPAGHKCQIAGWGHQDENVSGYSSSLREALVPLVADHKCSSPEVYGADISPNMLCAGYFDCRSDACQGDSGGPLACEKNGVAHLYGIISWGDGCGRLNKPGVYTRVANYVDWINDRIWPSKRPADPS

SEQ ID NO: 248 - protein, 461 aa, Sus scrofa
MSDLVAIFLHLLLFKLVAPVTFRHHRYDDLVRTLYKVHNECPYITRVYSIGRSVKGRHLYVLEFSDYPGNHEPLEPEVKYVGNMHGNEVLGRELLLQLSEFLCEEFRNGNQRIVRLVESTRIHILPSMNPDGYEVAAAQGRNISGYLIGRNNANGVDLNRNFPDLNTYIYYNEKNGGPNHHLPLPDNWKSQVEPETQAVIQWIRSFNFVLSANLHGGAVVANYPYDKSLEHRVRGFRHPTTTPTPDDKLFQKLAKVYSYAHGWMHQGWNCGDYFPDGITNGASWYSLSKGMQDFNYLHTNCFEITLELSCDKFPPQEELQREWLGNREALIQFLEQVHQGIKGMVLDENYNNLADAVISVSGINHDVTSGAQGDYFRLLLPGTYTVTATAPGFDPETVSVTVGPGEPKLVNFQLKRSTPPAAPKKRVPNSGQRVKVLPKKVQPRAARKKEMKKKQTQRAPA

SEQ ID NO: 249 - protein, 122 aa, Sus scrofa
MKLFIGLIFCSLVMGVSSDGWFSFFKEAVQGASDLWRAYWDMKEANYQNSGRYFRARGNYEAAQRGPGASGNVGEYFQGLLQYLGSSSEREEDQVSNRRAEEWGRSGQDPDHFRPAGLPKKY

SEQ ID NO: 250 - protein, 127 aa, Sus scrofa
MKLFTGLIFCSLVLGVHSQWLSFLGEAYEGKTHGGDMAPVAYSDMREANFKNSDKYFHARGNYDAAQRGPGGAWAAKVISDARENVQRHGDSGHGVEDSRADQAANEWGRSGKDPNHFRPPGLPDKY

SEQ ID NO: 251 - protein, 90 aa, Sus scrofa
DMREANFKNSDKYFHARGNYDAAQRGPGGAWAAKVISDARENVQRVTDWLKHGDSGHGVEDSRADQAANEWGRSGKDPNHFRPPGLPDKY

SEQ ID NO: 252 - protein, 646 aa, Sus scrofa
MTTSPGLLLLLLLLLVQPREGATSQEAVVCVGTACYSAHWGKLSADEAQLHCDKKGGNLATLKSEEEARHVQGTLAQLLQPGAPLAERMGRFWIGLQRDKGKCLDSDLPLKGFRWVDGVEDTPYTNWHKEAKNSCISKRCVSLLLDLSTPALASRLSKWAEGPCGSSRSPGNSVEGFVCKFSFKGMCRPLALGGPGQVTYTTPFQATSSTLQAVPFGSMAHVACGDRDESQQPYFLCKEKAPNVFEWNSSGPLCISPKLGCDFNNGGCEQDCFEGGDGSFRCGCRPGYRLLDDLVSCASRNPCSSSPCRGGATCVPVQLGKDFRCHCPPGYQLDLTGRDCVDVDECQDAPCTQECVNTPGSFRCECWVGYEPGGPGEGACQDVDECAPGRSPCAQGCTNTIGSFSCSCEDGYILAGEEGTQCLDLDECEGQGARRCGGLCLNTEGSFRCGCLPGWELAPDGVSCTGGPTSPAPSAGTPQVQDTGDGEGEHVSSATASSPTGDPEGTSETTWVVPTTGRSSLPRHVRTSLAPPEMLVPSGTRSVWSPVGPLATPGQRESTGDDFTAKHSDSGTDGQKLLLFYILGTVVAILLLLALALGLLVYRKRRAKREEKEKPKNAADSYAWVPERAESRAAENPYSPTPGTDC

SEQ ID NO: 253 - protein, 2488 aa, Sus scrofa
MGAAAGRSAHLGPAPAGYRLRSLLLVQLLLLVWAPRATGTQGTEFPELCSYTWEAVDTKNNRLYKISICGNVAVAPCGTSSAVCMQDLKTNSFHSVGDSVLKSASRSLLEFNTTVSCGQQSANHRIQSSITFLCGKTLGTPEFVTATDCVHYFEWRTTAACKKDIFKAKKEVPCYVFDRELKKRDLNPLIKVGGAYLVDDSDPDASLFINVCRDIDTLRDRAPQLRACPLGTAACLVRGDWAFDVGRPREGLQLLSNDRLVLSYVNEEPAPPDFCDGHSPAVTITFVCPSERREGTLPKLTAKSNCRYEVEWVTEYACPRDYLESRNCFLSSEQHDITIDLQPLSRVGDAPYTCEGEEYVFSLSVCGGAETPVCNEKDAAVCQVKKADSTQAKVAGRLQNQTLRYSDGDLTLIYFGGDECSSGFQRMSVINFECNKTAGNNGKGAPVFTGEVDCTYFFTWDTRYACVEEKEALLCGVADGRQRFDLSALARHSELEQNWEAVDGSQRGAEKKHFFINICRRVLQEGQARGCPEDAAACAVDESGSKNLGKFISSPTREKGNIQLSYSDGDECGGGKRINTNITLICKPGDLESAPVLRTSRADGCFYEFEWYTAAACVLSRTEGDNCTVFDAQAGFSFDLSPLTKTNGAYKVETEKYEFYINVCGAVSASACQPDSGACQVSKSDKKSWNLGRSNAKLSYYDGMIQLNYHDGTPYNNERRTPRATLITFLCDRDAGVGLPEYQEEDNSTYNFRWYTSYACPEEPLECVVTDPSTLEQYDLSSLAKSEGGRGGNWYALDSAGPHSTWRKYYINVCRPLNPVPGCDRYASACQMKYESHQGSFSETVSISNLGVAKAGPVVENSGSLVLEYVNGSACTTSDGRRTTYTTRIHLVCSRGSLNTHPIFSLSWECVVSFLWNTEAACPVRVTTDTDQACSIRDPNSGYVFDLNPLNRSQGYVLTGIGKTFVFNVCGTMPICGTLDGKLASGCEAETETKELKNLRPGRLVGLEKILQLSPEGFITLTYTGLPSHPKGPADAFIIRFVCNGDLYPGVPKFLHRDIDSRLGIWNTFFDFETALACVPSPVDCLVTDPEGNEYDLSGLSRVKKPWTAVDTTSDGKKRTFYLSVCNPLPYIPGCHGSMVGSCLVSEDKSLNLGVVQVSPQVAANGSLSVVYVNGDTCKDQRYSTRVILECAHTAGSPTFQLLDDCEYVFVWRTVEACPVVRVEGDNCSVKDPRHGNLYDLKPLALNDTVVSAGEYTYYFRVCGKLSSDVCPTSDRSKVISSCQEKRGPQGFQKVAGLLTQKLTYENGVLKMNYTGGDTCHKVYQRSTTIFFYCDRSTQAPVFLQETSDCSYLFEWRTQYACPPFDLTECSFKDAAGNTFDLSSLARYSDNWEAVTRTGATEHYLINVCKSLAPQAGSEPCPPEAAVCLLGGAKPVNLGRVRDGPQWKDGATLLKYVDGDPCPDRIRKKSTTIRFACRESQVSSRPMFISAVEDCEYTFSWPTAAACPVKSNVHDNCQVTNPVTGHLFDLSSLSGRAGYTAAYSEKGLVYISVCGDNENCAPGVGACFGQTRISVGKANKRLTYEDQVLRLVYKNGSPCPSKTGLTYTSVISFVCRPEAGPTDKPVLISLDKQTCTLFFSWHTPLACEQEVECTVRNGSSIIDLSPLIHRTGGYEAFDESEDAASDTNPDFYINICQPLNPMHGVPCPAGAAVCKVPVDGAPIDIGRVTGPPILNPIANEVYLNFESSTPCLADKHFNYTSLIAFHCKRGVSMGTPKLLRTSDCDFVFEWETPLVCPDEVTTEGCSLTDEQLSYSFNLSSLSKSTFKVTRDSRTYSVGVCTAAAGLDQGGCKDGGVCLLSGSRGASFGRLASMKLDYRHQDEAVILSYANGDNCPPETEEGDPCVFPFTLNGKSYEECVLEGRARLWCATTADYDRDHEWGFCRHSNSHRTSAIIFKCDEDADVGRPQVFSEVRGCEVTFEWKTKVVCPPKKMECKFVQKHRTYDLRLLSSLTGSWFFVHDGASYYLNLCQRIYKGPLDCSDRASVCKKNPSGNVQVLGLVHTQKLDVIGDRVVVTYSKGHQCGGNKTASTVIELTCAKTVGRPSFSRFDVDSCTYHVRWDSRAACAVKPQEVHMVNGTFTNPASGQSFSLGDIYFKRFSASGDMRANGDKYLYEIQLSSITSATHPACAGANICQVKPNDQHFSRKVGTSDKTKYYIQDGDLDVVFASSSKCGKDKTKSVSSTIFFHCDPLVKDGSPEFSHETADCQYLFSWYTSAVCPLEAGFGKNTGDDEPEHKGLSERSQAVGAILSLLLVALTGCLLTLLLYKKERREAVMSRLTSCCRRGASVSYKYSKVNKEEEADENETEWLMEEIQLPTPRPGKEAQENGHITTKSVKAEALSSLRGDDQDSEDEVLTIPEVKVHPGRGPGDEGAHPMRPPQRQVLRERADDRVGLVLEEPARRGRPRAAHNKAVNSFHDDSDEDLLHI

SEQ ID NO: 254 - protein, 816 aa, Sus scrofa
TLLASPKMDHKEVVLLLLLFLKSGLGDSLDDYVNTQGAFLFSLSRKQVAARSVEECAAKCEAETNFICRAFQYHSKDQQCVVMAENSKTSPIARMRDVVLFEKRIYLSECKTGNGKNYRGTTSKTKSGVICQKWSVSSPHIPKYSPEKFPLAGLEENYCRNPDNDEKGPWCYTTDPETRFDYCDIPECEDECMHCSGEHYEGKISKTMSGIECQSWGSQSPHAHGYLPSKFPNKNLKMNYCRNPDGEPRPWCFTTDPNKRWEFCDIPRCTTPPPTSGPTYQCLKGRGENYRGTVSVTASGHTCQRWSAQSPHKHNRTPENFPCKNLEENYCRNPDGETAPWCYTTDSEVRWDYCKIPSCGSSTTSTEYLDAPVPPEQTPVAQDCYRGNGESYRGTSSTTITGRKCQSWVSMTPHRHEKTPGNFPNAGLTMNYCRNPDADKSPWCYTTDPRVRWEYCNLKKCSETEQQVTNFPAIAQVPSVEDLSEDCMFGNGKRYRGKRATTVAGVPCQEWAAQEPHRHSIFTPETNPRAGLEKNYCRNPDGDDNGPWCYTTNPQKLFDYCDVPQCVTSSFDCGKPKVEPKKCPARVVGGCVSIPHSWPWQISLRHRYGGHFCGGTLISPEWVLTAKHCLEKSSSPSSYKVILGAHEEHHLGEGVQEIDVSKLFKEPSGADIALLKLSSPAIITDKVIPACLPTPNYVVADRTACYITGWGETKGTYGAGLLKEARLPVIENKVCNRYEYLDGKVSSNELCAGHLAGGIDSCQGDSGGPLVCFEKDKYILQGVTSWGLGCALPNKPGVYVRVSRFVTWIEEIMRRN

SEQ ID NO: 255 - protein, 1054 aa, Sus scrofa
MASQLQVFSPPSVSSSAFCSAKKLKIEPSGWDVSGQSSNDKYYTHSKTLPATQGQANSSHQVANFNIPAYDQGLLLPAPAVEHIVVTAADSSASAATSTFQSSQTLTHRSNVSLLEPYQKCGLKRKSEEVDSNGSVQIIEEHPPLMLQNRTVVGAAATTTTVTTKSSSSSGEGDYQLVQHEILCSMTNSYEVLEFLGRGTFGQVAKCWKRSTKEIVAIKILKNHPSYARQGQIEVSILSRLSSENADEYNFVRSYECFQHKNHTCLVFEMLEQNLYDFLKQNKFSPLPLKYIRPILQQVATALMKLKSLGLIHADLKPENIMLVDPVRQPYRVKVIDFGSASHVSKAVCSTYLQSRYYRAPEIILGLPFCEAIDMWSLGCVIAELFLGWPLYPGASEYDQIRYISQTQGLPAEYLLSAGTKTTRFFNRDPNLGYPLWRLKTPEEHELETGIKSKEARKYIFNCLDDMAQVNMSTDLEGTDMLAEKADRREYIDLLKKMLTIDADKRITPLKTLNHQFVTMTHLLDFPHSNHVKSCFQNMEICKRRVHMYDTVSQIKSPFTTHVAPNTSTNLTMSFSNQLNTVHNQASVLASSSTAAAATLSLANSDVSLLNYQSALYPSSAAPVPGVAQQGVSLQPGTTQICTQTDPFQQTFIVCPPAFQTGLQATTKHSGFPVRMDNAVPIVPQAPAAQPLQIQSGVLTQGSCTPLMVATLHPQVATITPQYAVPFTLSCAAGRPALVEQTAAVLQAWPGGTQQILLPSTWQQLPGVALHNSVQPTAVIPEAMGSGQQLTDWRNAHSHGNQYSTIMQQPSLLTNHVTLATAQPLNVGVAHVVRQQQSSSLPSKKNKQSAPVSSKSSLDVLPSQVYSLVGSSPLRTTSSYNSLVPVQDQHQPIIIPDTPSPPVSVITIRSDTDEEEDNKYKPNSSGLKARSNVISYVTVNDSPDSDSSLSSPYSTDTLSALRGNSGPLPEGPGRVVGDGTGTRTIIVPPLKTQLGDCTVATQASGLLSSKTKPVASVSGQSSGCCITPTGYRAQRGGTSAAQPLNLSQHVPPDI

SEQ ID NO: 256 - protein, 1661 aa, Sus scrofa
MGSTSGPRLLLLLLTSLPLALGDPIYTIITPNVLRLESEEMVVLEAHEGQGDIRVSVTVHDFPAKRQVLSSETTTLNNANNYLSTVNIKIPASKEFKSEKGHKFVTVQALFGNVQVEKVVLVSLQSGYLFIQTDKTIYTPGSTVLYRIFTVDHKLLPVGQTIVVTIETPEGIDIKRDSLSSHNQFGILALSWNIPELVNMGQWKIRAHYEDAPQQVFSAEFEVKEYVLPSFEVQVEPSEKFYYIDDPNGLTVNIIARFLYGESVDGTAFVIFGVQDGDQRISLSQSLTRVPIIDGTGEATLSQGVLLNGVHYSSVNDLVGKSIYVSVTVILNSGSDMVEAERTGIPIVTSPYQIHFTKTPKFFKPAMPFDLMVYVTNPDGSPARHIPVVTEDFKVRSLTQEDGVAKLSINTPDNRNSLPITVRTEKDGIPAARQATKTMHVLPYNTQGNSKNYLHLSVPRVELKPGENLNVNFHLRTDPGYQDKIRYFTYLIMNKGKLLKVGRQPRESGQVVVVLPLTITTDFIPSFRLVAYYTLIAANGQREVVADSVWVDVKDSCVGTLVVKGGGKQDKQHRPGQQMTLEIQGDRGARVGLVAVDKGVFVLNKKNKLTQRKIWDVVEKADIGCTPGSGKDFAGVFTDAGLAFKSSKGLQTPQRADLECPKPAARKRRSVQLMEKRMDKLGQYSKELRRCCEHGMRDNPMKFSCQRRAQFIQHGDACVKAFLDCCEYIAKLRQQHSRNKPLGLARSDLDEEIIPEEDIISRSQFPESWLWTIEEFKEPDKNGISTKTMNVFLKDSITTWEILAVSLSDKKGICVADPYEVVVKQDFFIDLRLPYSVVRNEQVEIRAILYNYREAEDLKVRVELLYNPAFCSLATAKKRHQQTLTVPAKSSVPVPYIIVPLKTGLQEVEVKAAVYNHFISDGVKKTLKVVPEGMRVNKTVVTRTLDPEHKGQQGVQREEIPPADLSDQVPDTESETKILLQGTPVAQMVEDAIDGDRLKHLIQTPSGCGEQNMIGMTPTVIAVHYLDSTEQWEKFGLEKRQEALELIKKGYTQQLAFRQKNSAFAAFQDRLSSTWLTAYVVKVFAMAANLIAIDSQVLCGAVKWLILEKQKPDGVFEENGPVIHQEMIGGFKNTEEKDVSLTAFVLIALQEAKDICEPQVNSLLRSINKARDFLADYYLELKRPYTVAIAGYALALSDKLDEPFLNKLLSTAKERNRWEEPGQKLYNVEATSYALLALLVVKDFDSVPPIVRWLNEQRYYGGGYGSTQATFMVFQALAQYQKDVPDHKDLNLDVSIHLPSRSAPVRHRILWESASLLRSEETKENERFTLIAEGKGQGTLSVVTMYHAKTKGKTTCKKFDLKVSIHPAPEPVKKPQEAKSSMVLDICTRYLGNQDATMSILDISMMTGFSPDTEDLKLLSTGVDRYISKYELNKALSNKNTLIIYLDKISHTLEDCISFKVHQYFNVGLIQPGSVKVYSYYNLDESCTRFYHPEKEDGMLNKLCHKEMCRCAEENCFMHHDEEEVTLDDRLERACEPGVDYVYKTRLLKKELSDDFDDYIMVIEQIIKSGSDEVQVGQERRFISHIKCREALKLKEGGHYLVWGVSSDLWGEKPNISYIIGKDTWVELWPDGDVCQDEENQKQCQDLANFSENMVVFGCPN

SEQ ID NO: 257 - protein, 500 aa, Sus scrofa
MSAWVALLLLWGLALSRVTEEALFLDPRPNLWAEAQSLLEPWANVTLTCQSRLPTLAFQLLRDGVAQDPVRLASPALEHRFPLGAVTSDTRGLYRCRSGLNSRWTGLSNLVEVTGSEPLPPPLLSTKPVPWITPGLNTELLCHGGLHGVTFLLRREGDDQFLEVVEAPEDTKAIFPVKRPGNYSCTYRTHAAGAPSEPSATVTIEELARPPPPTLTIKTDSAAVLSPGSGVSFTCVATLEGVHFQLRRGEEVLMVPRASTSPDRIFFQLNNLTLEDRGFYTCSYQLRDNLTPWSLDSAPVELVLSDGTLPAPELSAEPAALSPAPGSVVQLRCRAPRSGVRFALVRKDAREHRVHGLLSPEGTEALFELRDVSGAHSGNYSCVYTDLAPPFSGSAPSASVELRVDGPLPRPQLRPRRIGAVTPGRDAVFHCEGRVPDVIFELLRAGKAEPLEKVWSHHPSADLVLTYVGPQHAGKYSCRYRSYPLLSELSDPVELQVAGS

SEQ ID NO: 258 - protein, 680 aa, Sus scrofa
MISASHEVQGILKAQIQEYLYRYGYTQVAEMTDRKQSLEPALKLLQQRLSLPQTGELDTTTLNAMRAPRCGVPDLGKFQTFEGDLKWHHHDITYWIQNYSEDLPRDVIDDAFARAFALWSEVTPLNFTRVYGPNADIVIQFGVKEHGDGYPFDGKDGLLAHAFPPGPGIQGDAHFDDEELWSLGKGVVVPTYFGNAKGAACHFPFTFEGRSYSACTTDGRSDDMLWCSTTADYDTDRQFGFCPSERLFTRDGNADGKPCVFPFTFEGRSYSSCTTDGRSDGYRWCGTTANYDQDKLYGFCPTRADSTVTGGNSAGDLCVFPFTFLGKEYSACTREGRSDGHLWCATTSNFDKDKKWGFCPDQGYSLFLVAAHEFGHALGLDHSTVPEALMYPMYSFTEEHPLHEDDVRGIQYLYGSRPKPEPRPPTTTTAEPQSTVPPTVCVTGPPTTRPSERSTAGPTGPPSAGPTGPPTAGPSAAPTVSLGPGEDICNVDIFDAIAEIRNRLHFFKDGKYWRLSEGKEHRVQGPFLIKDRWPALPHKLDSAFEEPLSKKIFFFSGRQVWVYTGASVLGPRRLDKLGLGPEVARVTGALPREAGKVLLFSQQNFWRFDVKTQKVDSRSATRVDQMFPGVPLNTHDIFQYQEKAYFCQARFFWRVSSRNEVNQVDYVGYVTFDLLKCPED

SEQ ID NO: 259 - protein, 473 aa, Sus scrofa
MEHCVVTANISQTGEGTFAGINGQRPLASPALRAGGGSGSTQRIPLCEADMRAEGMSLFLALGLLVAGLCSRVHCVPADDLASKTVTLKGQITKLPAHNTAVVSSNTDFAFSLYKQLVSLDPNKNVIFSPLSVSIALAFLSLGARGSTLTELLEGLKFNLTKTPEAEIHQGFQHLLRALSQPSNLLQLNVGNAMFVDERLKLLDKFVQDARELYFSEAFSISFKDSDAAVEFINNYVKNKTKGKIVDLFKQLSPDTVLVLVNCIYFKAKWKTPFDPSFTTEADFHVSKNRTVRVPMMGISGRTLPYFRDEELACTVVELPYTSNDSALFILPDDGRMAAVEAQLLPETLRRWRDSLHQRRITALHLPRFSVSGDYTLHDILPHLGIKKVFSHQADLSGITDQARLKVSQVVHRAVLDVDEEGTEGAAATGISIELTSIEFLTVHFNRPFLFSIIHKDTQSIIFSGKVTDPSQA

SEQ ID NO: 260 - protein, 406 aa, Sus scrofa
MSLSLALGLLVAGLCSRVHCLPADDLASKIVTLKDQITQLPTHNTAVVSSNTDFAFSLYKQLALTNRHKNIIFSPLSVSMALAFLSLGARGPTLTELLEGLKFNVTETPEAEIHQGFQHLLRTLNRPSNLLQLRLGNAMFIDEQLELLEKFVQHARELYHSEAFSTNFQDLEAARGLINDYVKNKTEGKIAVLVNYIYFKAQWMTHFDTNLTTEADFYVSKNSTVRVPMMGIKNLTVPYFRDEELACTVVELPYTSNDSTLFILPDDGRMAAVEANLLPETLRRWRDYLQPRRIDALHLPRFSISSDYKLEEILPRLGIKKIFSVKANLSGITDTTPLYVSQVAHSAVLDVDEEGTEGAASTGVVIERKSFENFIVRFDSPFLFATVLRDTQSIIFLGKVVNPHPA

SEQ ID NO: 261 - protein, 417 aa, Sus scrofa
HEAEGMSLFLALGLLVAGLCSRVHCVPEKWDPERPAQQDSRGPPRHCPSNTDFAFSLYKQLVSLDPSKNVIFSPLSVSMALAFLSLGARGPTLTELLEGLKFNLTKTPEAEIHQGFQHLLQALSQPSNLLQLNVGNTMFVDEHLKLLDEFRRDAQAKFASDVFSTNFKDPEAAIVFINDYVKNKTKGKIPKLFDEHATFSVMVLVNYIYFNAKWKTPFDPEHTIESTFQVSKNRTVKVPMMSLRGLETPYFRDEELACTVVELPYTSNDSALFILPDDGRMAAVEAKLLPETLRRWRDSLQPRRIDVLYLPRFSVSGDYQLKDTLKQLGIQKVFTHEADLSGVTGDKKLGVSKVIHKAVLDVGEEGTEAAAATGIAMMTSTLYSLTVSFSRPFLFAVIDKDTGTVLFLGKVADPSPA

SEQ ID NO: 262 - protein, 423 aa, Sus scrofa
MKAEGMSPFLALGLLVAGLCSRVHCVPEGKPDPENGTPNDQHSRTPVDPHAIVPSNTDFAFSLYKQLVSLDPSKNVIFSPLSVSIALAFLSLGARGPTLTELLEGLKFNLTKTPEAEIHQGFQHLLQALSQPSNLLQLNVGNAMFVDEHLKLLDEFRQDAQAKFASDVFSTNFKDPGAAVVFINDYVKNKTKGKIPKLFDEHATFSVMVLVNYIYFNAKWKTPFDPEHTIESTFHVSKNRTVKVPMMSLRGLETPYFRDEELACTVVELPYTSNDSALFILPDDGRMAAVEAKLLPETLRRWRDSLQPRRIDALYLPRFSVSGDYQLKDTLKQLGIQKVFTHEADLSGVTGDNKLGVSKVIHKAVLDVGEEGTEAAAATGIEMMTSTLQSLTVIFSRPFLFAVIDKDTGTVLFLGKVADPSPA

SEQ ID NO: 263 - protein, 418 aa, Sus scrofa
MSLFLALGLLVAGLCSRVHCVPADDPASKIVTLKDQIKKLPAHNTAVVSSNTDFAFSLYKQLALTNPHENVIFSPLSVSMALAFLSLGTQGPTLTELLEGLKFNLTKTPEAEIHQGFQHLLSTLDSSSNLLQLRLGNAMFIDEQLELLDKFVQDAHELYHSEAFSTNFQDLEAARRLINDYVKNKTEGKIVDLFKKLDSLTKVVLVNYIYFKAKWKTPFNPNLTTEADFHVSKNRTVRVPMMGIRALTVPYFRDEELACTVVELPYTSNDSALFILPDDGRMAAVEAKLLPETLRRWRDFLQPRRIDALHLPRFSISSDYKLEEILPRLGIKEIFSAEADLSGITDTKPLYVSQVVHSAVLDVDEEGTEGAASTGVVIERKSFENFIVRFDSPFLFATVLRDTQSIIFLGKVVNPHPA

SEQ ID NO: 264 - protein, 408 aa, Sus scrofa
MRLCLLLCLVLLSPRGASLGRHHSRETKKRVLKLPPAVATVAPGIRDFTFDLYRTLAAASPEQNVFFSPLSISMSLAMLSLGAQSSTKAQILEGLGLNPQEGPEEELHSASQRLLRELGQPREDLQLSLGNALFTKPTLSIQEAFLGTLRTRYLADVFPTDFEDPEGAQKQINNYVVKQTKGKIVDLVKGLDGTEVMVMVNYIFFKAKWETSFNHKITHEQDFHVTSETVVRVPMMKREDQFYYLLDRNLSCKVVGVPYQGNATAFFVLPQEGGMEQVEKGLKEKTLRKWLKMSMKRQLELHLPKFSIEGSYQLENVLPKLGIRDVFTSHADLTGISNTSNIQVSEMVHKAVVEVDESGTKAAAATGTIFMFRSARISSQRIVFNRPFLMFIVENSKNILFVGKVTHP

SEQ ID NO: 265 - protein, 514 aa, Sus scrofa
MTPTAVITNTSQSSNRAGSRITIHSVCRTGWQARYFEKKVTSCLLHIVFRPVPGIDLTNIDEAASIIKHYFPVGKRRRGPEDPGPQPRDLARMGPARLWLLGAGILASVHRQPFPAHGSKSLGGPEAPGRQLSGARPAYHKITPTLTDFALRLYKQLAAETPGNIFFSPVSISSTLALLSLGAQADTPTQILEGLGFNLTEIPEADIHRGFQSLIRTLGLPSSKLEMKVGNSLFLDKQLKPQQHFLDNIREVYGALAFSANFTDSGTTRRQINDYLRKQTYGQVVDCLEEFAQDTLMVLLNYIFFKAKWKHPFNPYQTQKQESFFVDERTSLRVPMMRQKEMHRFLYDHEVACTVLQIEYSGNAQALLILPDPGKMAQVEAALQPETLRKWDQLLLPSLLDLHLPRFSISGTYNLEEILPRIGLTNLFSLEADLSGITGQLNRTVSRVSHKAAVDMSERGTEAAAASGLLSQPQSLNTTSAPHAHFNRPFLVLLWEVTTQSLLFLGKVVNPAAG

SEQ ID NO: 266 - protein, 420 aa, Sus scrofa
MASSSTWGLLLLAGLCCLVPISLAEGLQGHAVQETDVPRHDHEQHQEAACHRIAPNLADFAFSLYRQVARQSNTSNIFLSPVSIATAFAMLSLGTKGATHAEILEGLQFNLTEKAEAEIHEGFQHLLHTLNQPDNQLQLTTGNGLFVDKKAKLVPKFLEDVKNLYHSEAFSINFRDTEEAKKCINDYVEKGSQGKIVDLVDELDKDTVFALVNYIFFKGKWEKPFEVEQTTEEDFHVDEETTVKVPMMNRLGMFDLHHCEKLSSWVLLMDYVGNATAFFILPDGKLHQLEDMLTKEILAKFLEKRYPSSANLHLPKLTISGTYDLKSLLGNLGITKVFSDEADLSGVTEEQPLKLSKALHRAVLTIDEKGTEATGATILEAIPMSIPPNVKFNKPFLFLIYDTKTKAVLFMGKVMNPTQK

SEQ ID NO: 267 - protein, 1535 aa, Sus scrofa
ITGNHDAHLNGKVIGTLKNSLFFSAQPLEITASTINEGNLRVSFPLKLTGKIDFLNNYALLLSPSAQQASWQASARFNQYKYNQNFSAVNNERSTEAHIGINGEANLDFLNIPLTIPEMTLPYTRLTVPQVKDISLWEKTGLKEFLKTTKQSFDLSVKAQYKKNKDKHSIPNPLDVFYAFINRNINSFNRHFETVRDKALDFFTESYNEIKITFDKYKVEKPLDQQPRTFQIPGYTIPVINIEVSPFTVKMLTFGYVIPKEISTPNITILGSGISVPSYTLGLQFLELPALDVPRNILQISLPELAVSGTSNKILIPAMGNITYDFSFKSSVITLNTNVGLYNQSNIVAHFLTFSSSVIDALQYKLEGTSSLMRKRGLKLATALSLSNKFMEGNHDSTISFTKKNVDASLTTTARVQLPILRMNFKQELKGNTKSKPTISSSIELKYDFNSPKLHSTAAGAVDHKLSLESLTSYFSIEMSTKGDVKGSILSRVYSGSLASEASTYVNSKGTRSSVKLQGASKVDDIWNLEVKENFAGEATLLRIYTIWEHHTKNHLQLEGLILTSGEHTSKATLELSPWNIAALVQVHTRQPSSLLNIHYLSQEVSLNANTENQKISWKSQVQVHSGSLQNNLQLSNDKEEARFDISGSVEGYLSFLKYTVLPVYDMSLWDLLKLDVTTSINRKQYLRASTALVYTKNPNAYPVSIPVQELTDKFIIPGLKLNNLNEIKIYKKLSTSSFSLNIPTLPKVKFPKVDVLTQYSNPETSSVPFFEVTVPAYQLTVSPFTLPKSISVGSAVLDLDVVASYIADFEVPTVTMPEQTIEIPSIKFSVPAGISLPSFGTLTARFGVASPLYNATWSAGLKNKEDRVETFLDSTCSSTIQFLEYDLNVVGTHKIEDGMLVCSTKGSFAHRDLSAEYEENGKYHGLEYWDGKIILNITSPTLTDVYLRYQQSKNHLFSSLASPAIGTVALEQENINTSLKSNLYYRPQSSPDKKLNIFKIEKRDLESDEDVQIKANWEEEAVSELLRSLKDNVPKATGAFYDYVNKYHQEYTGLDLRDASLKLRKGLQNSADQAYQGAVRQIDEVDRGLRKIARGTTKTYQQWKDRAQSLYQKLLAQEDQGDFQGLRNKVFDSVIGVTQEYNVTVKRAVDSLIKSLKFTRFQLPGRARNYTGDELCNMVMTEVGEVLSQIYSKIHSGLEILLSYFQDLMEKSKLNKARKIKFTFDSVKYQLTDVVSEYGEQLKSLSQDVQKALSDLHSINITEILSELQIFLEGIFQEIEEELTRLKEKKLADFINDIQQNINTTFNIYAPLGFRLLKENLDSPFGMLNEFIQNTLWEASQELQQLHQYIKALRKEYFDPSMVGWTVKYYELEEKVINLIKNLVDVLKDFHSKYTVSATDFASQLSSQVEQFVQEDIQEYLSILADADGKGKEKIAQLSSRAQEIIKSWAVTMKEIISDYHQQFIYKLQDFSDQLSDYYEKFIAETERLIDLSIQKYHMFLRYIMKLLKELQSDTVNDMRPYIKVAPGEFTITF

SEQ ID NO: 268 - protein, 4223 aa, Sus scrofa
MGPPRPASLLLLLLLLATTCAGAREEVPGTVGQSCPRDATLFKHLRKYVYSYEAESSSGVPGTADSRSSTKINCKVELEVPQLCSFILKTSHCSLKEVYGFNPEGKALLKKAKNSEEFAAAMSKYELRLAVPEGKQVLLYPEKEEPKHILNIKRGIISALLLPPETEETKQVLYLDTVYGNCSSDLTIKKGREHVATEISIERNLEKCDRFQPISTGVSPLALIRGMTRPLSTLIGSSQSCQYTLDPKRKHVSEAICKEQHLFLPFSYKNKYGMMAQVTQTLKLEETPKINSRFFNEGAEAVGLAFESTKSTSPPKQAEAIVKTLQELQKLHVSEQNAQRANLFHRLVTELRGLSSEAVATLLPKLMEVSSPITLQALVQCGQPQCYTHILRWLKNEKANPLLIDVVTYLVALIPEPSAERLREVFNTAKEQQSRATFYALSHVINNYHRTNPTGTQDLLEIADYLLEQIRDNCTGNEDHTYLSLRVIGNIGRTMEQLTPKLTSSVLKCIKSTQPSLLIQKAAIQALRKVELGDQVREVLLQTFLDNVSPGEKRLAAYLMLMRAPSQSDINKVTQLLPGEKNEQVKNFVASHLANILHSEESYIQELKKLVEEALKNSQLPTIMDFKKFSRNYHFSKSISLPSLDPVSTTIEGNLIFDPNNYLPKESMLKTTLRVFGFAPADLFEIGLEGKGFEPTLEALFGKQGFFPDSVNKALYWVDGQVPDRVSKVLVDHFGYTKDERREQDMVNGIMFSLENLIKDLKSKEFPEARAYLHILGEELGFVKLHDLQLLGRLLLNGVRTLQGIPQMITEIIRKGSKNDLFLHYIFMDNAFELPTGLGLQLQVSSSGVLTPGVKAGVKLEVAQMQAELVTKPSVSVEFVTNMAIIIPDFARSGVQMNTNFFHETGLEARVALRAGQLRLIIPSPKRPVRLFSASNTLHLVSTTKTEAIPPLIENRQSWSTCKPFFIGLNYCTTVAYSNASSTDSSSYYPLTGDTRFELDLKPTGEVEQYSASTSYELQRDGDALVDMLKFVTQAEGVKQTKATMMFRYNRQSKTLSSEIQIPDFDIELGTILRVSEKSTMEKKAYKLTLDLQNKKITEVTLTGHVSYERKEEGRIKGVISIPRLQAEARSDILTHWSPSKLLLQMDSSATAYGSTISKRVVWRYDEEKIEFEWNAGTNMDTKKAASNFPVDLSDYPKSLHTYAKSLLDHRVPQTDMTFRHMGSKLIGATNTWLQEASRNLPYAQNLQDHLSGLQELYLQKMQLPHIHIPEKLFLKSDGRIKYTLNQNSVNIEIPLPFGGKSSKDLKMLETIWTPALSFQPVGFYLPSREVRIPTFTIPKLYQLQVPLMGVLDLSTNIYSNLYNWSASYTGGNTSTDQHWSLQAQYHVKADSVVDLLSYSVQGSGKTTCDRRNAFTLSGDGSFHHKFLDSNVRFSYTENTGNNPASKGLLTFDTSSAWGPQISASVHLDSKKKQHVYVKEVKIDGQFRASSFYTKGTYDLSYQKDPTTGRLSGESNLRFNSSYLQGTNQITGRYEDGTVSLTSTSDLQGGLMKNTASLKYENYELSLKSDTNGKYEDFATSNKVDLTFSKQSALLRSEYQANYKALRFFTLLSGSLNSHGLELNADILGTDKINSGAHKATLRITQDGLSTSATTNLKYSPLVLENELNTALGLSGASLKLTTNGRFREHNAKFSLDGKAALAEVSLGSAYQAMILGVDSKNIFNFRINQEGLKLSNDMMGSYAEMKLDYSNSLNIAGLSLDFSSKLDNIYSSDKFYKQNFNLQLQPYSLVTTLNNDLKFNTLDMTNKGNLRLEPLKLNVGGTIKGAYENNEIKHIYTLSYADLSASYKADTIAKVQGTEFSHRLNTNIAGLASTVDISTNYNSDSLHFSNVFHSAMAPFTITVDTHTSGNGKLILWGQHTGQLYSKFLMKAEPLAFTFSHDYKGSTSHHLLSRRSMNTALDHKVSALLTLAEQTGTWKLKTQLNQNEYSQNFDAYNTKDKVGVELNGRGLADLTVLDSTITVPLLLSEPINVIDALEMRDTVDQPQEFTVVASVKYDKNQNHHTINLPFFNILPEYFEKTRLVGIVALEAIQRELKHININQPMRKYGAALDKFPQQVNDYLSTFSWERQVLSAKKKLSDFMEDYRITENDVRIALDNAKINLNEKLTQLQTYVIQFDQYIKDNYDLHDFKTAIARIIDEIIATLKILDERYHIHVNLVKKIHDLHLFIEKIGFNKTRSSTASWFQNVNINYQIRLWIQEKLQQLKAQIQNIDIQHLAEKLKQQVEDIDARVLLDQLRTTIPFQEIKEVIEHVKYCVKSLFEDFEVTKEINAFRAMVHELIKMYKIDEHIQVLMDNSVHLAHQYKLQETVQKLSSILQQVKIQDLLETLTWFIDDTLKQLEALSFQQLIEEVNKFLDMLVKRLRSFDYHHFLDETNKNLHEVTQRINGKIQALELPQKFTALKLLSEDIKALISVHLENLKATKITLFFDWLQGTLSSTPIVHMKAKFHETLEDVRDRMYQMDVQQEIQRYLFLVGQVYSTLVTYISDWWDLAAKNLTDFAEQYSIQDWAKNLKALVEQGFTVPEIQTTFGTLPAFEVSLRALQEATYQTPDFIVPLTDLKIPSVQINFKKLKDIEIPSRFSTPEFTVLNTFHVPSFTIDLVEIKAKIIRTIDQMLNSELQWPVPEVYLRDLNGVETMLARITLPDLYLPEIRIPEFVIPNLNLTDFQVSDLHIPEFQLPHIPHTVEVPAFGKLHGILKIQSPLLILEANANIQNITTSENTAEMEASFTAKGESKFEVLNFDFQANAQLSDPEINPLVLKESVRFSSKYLKTEHGSEVLFVGNSIEGKSNTVAGLYTGKNTLKLSNDVLLKVNNQLTLNSNTKYFHELNIPKLDFSSQADLRSEIKTLLEASHIAWRSSGKGSWKLACHRFSDEGTHESQISFTVEGPITSFGLSNEIRSKHLRVNQSMVYESAFLKFSKFEIHSQAECQYVGRSVLTAKGMVLPRERKAEITGNHDAHLNGKVIGTLKNSLFFSAQPLEITASTINEGNLRVSFPLKLTGKIDFLNNYALLLSPSAQQASWQASARFNQYKYNQNFSAVNNERSTEAHIGINGEANLDFLNIPLTIPEMTLPYTRLTVPQVKDISLWEKTGLKEFLKTTKQSFDLSVKAQYKKNKDKHSIPNPLDVFYAFINRNINSFNRHFETVRDKALDFFTESYNEIKITFDKYKVEKPLDQQPRTFQIPGYTIPVINIEVSPFTVKMLTFGYVIPKEISTPNITILGSGISVPSYTLGLQFLELPALDVPRNILQISLPELAVSGTSNKILIPAMGNITYDFSFKSSVITLNTNVGLYNQSNIVAHFLTFSSSVIDALQYKLEGTSSLMRKRGLKLATALSLSNKFMEGNHDSTISFTKKNVDASLTTTARVQLPILRMNFKQELKGNTKSKPTISSSIELKYDFNSPKLHSTAAGAVDHKLSLESLTSYFSIEMSTKGDVKGSILSRVYSGSLASEASTYVNSKGTRSSVKLQGASKVDDIWNLEVKENFAGEATLLRIYTIWEHHTKNHLQLEGLILTSGEHTSKATLELSPWNIAALVQVHTRQPSSLLNIHYLSQEVSLNANTENQKISWKSQVQVHSGSLQNNLQLSNDKEEARFDISGSVEGYLSFLKYTVLPVYDMSLWDLLKLDVTTSINRKQYLRASTALVYTKNPNAYPVSIPVQELTDKFIIPGLKLNNLKSAHVTPAFQVPFTDLRFPSYTLDFSEIKIYKKLSTSSFSLNIPTLPKVKFPKVDVLTQYSNPETSSVPFFEVTVPAYQLTVSPFTLPKSISVGSAVLDLDVVASYIADFEVPTVTMPEQTIEIPSIKFSVPAGISLPSFGTLTARFGVASPLYNATWSAGLKNKEDRVETFLDSTCSSTIQFLEYDLNVVGTHKIEDGMLVCSTKGSFAHRDLSAEYEENGKYHGLEYWDGKIILNITSPTLTDVYLRYQQSKNHLFSSLASPAIGTVALEQENINTSLKSNLYYRPQSSPDKKLNIFKIEKRDLESDEDVQIKANWEEEAVSELLRSLKDNVPKATGAFYDYVNKYHQEYTGLDLRDASLKLRKGLQNSADQAYQGAVRQIDEVDRGLRKIARGTTKTYQQWKDRAQSLYQKLLAQEDQGDFQGLRNKVFDSVIGVTQEYNVTVKRAVDSLIKSLKFTRFQLPGRARNYTGDELCNMVMTERF

SEQ ID NO: 269 - protein, 105 aa, Sus scrofa
MSRLCLSAALLLLLGALVASTQGCEERSQIEELPPAFCLEPPYTGPCKARMIKYFYNIRSRSCEEFIYGGCEAKKNNFEAMEDCMRTCGSWRDFCGPVLPRDAED

SEQ ID NO: 270 - protein, 127 aa, Sus scrofa
MSRLCLSAALLLLLGALVASTQGCEERSQIEVVHLVDRAPGTLLPTDQSSSRPELPPAFCLEPPYTGPCKARMIKYFYNIRSRSCEEFIYGGCEAKKNNFEAMEDCMRTCGSWRDFCGPVLPRDAED

SEQ ID NO: 271 - protein, 365 aa, Sus scrofa
MMYDDIANSEDNPTPGIVINRPNGSDVYKGVLKDYTGEDVTPQNFLAVLRGDAEAVKGKGSGKVLKSGPRDHVFVYFTDHGATGILVFPNEDLHVKDLNETIHYMYKHRMYQKMVFYIEACESGSMMNHLPPNIDVYATTAANPRESSYACYYDEARATYLGDWYSVNWMEDSDSEDLTRETLHKQYQLVKSHTNTSHVMQYGNKSISAMKLVQFQGLKHKASSPISLPPVQHLDLTPSPEVPLTIMKRKLTRTNDLQESRRLVAEIDRHLQARNVIEKSVRKIVSLTVGSDAEVDRLLSQRDPLTAHECYQEAVLHFRTHCFNWHSPTYEYALRHLYVLANLCENSYPIASIKLSMDKVCLGYY

SEQ ID NO: 272 - protein, 315 aa, Sus scrofa
MAKTFSFILLTTALVMVAKQITHSGRIDQGMVRRESREQIRNSPRKKKKKKDRQTDRKKEIVFLFLKRNKNFLISTGKCRQSFADCSEIFNDGFKQSGFYKIKPLQSPAEFSVYCDMSDGGGWTVIQRRSDGSENFNRNWNDYENGFGNFVQKNGEYWLGNRNLHVLTTQGDYTLKIDLADFEKNNRYAQYKNFKVGDEKNSYDLHIGEYSGTAGDSLAGNFHPEVQWWGSHQRMKFSTWDRDNDNYEGNCAKEDLSGWWFNRCHSANLNGLYHSGPYTAKTDNGIVWHTWHGWWYSLKSVVMKIRPNDFIPNIV

SEQ ID NO: 273 - protein, 344 aa, Sus scrofa
MAKLMVLTLLGLGLALFRDHRSSYLTRMNAFREIKPVELPNCKLVKGIESGSEDLEVLHNGLAFISTGLKYPGIKVFEPDKPGKILLMDLNEEDPTVLELRITGSNFDLSSFNPHGISTFTDEDNTVYLLVVSHPDLKSTVELFKFQEEEKTLLHLKTIKHKLLPKINDIVAVGPEHFYATNDHYFVDTYLTFWEMYLGLAWSYAVYYSPNEVQVMASGFDFANGINISPDGKYVYIAESMAHKIHVYEKHANWTLTPLKSLDFDTIVDNISVDPVTGDLWIGCHPNGMKVFFYDPENPPGSEGEGTISHQVVCQKRVKEKKETAGTTYKMSKWSSNNFTLFYS

SEQ ID NO: 274 - protein, 1135 aa, Sus scrofa
MGLMGPRGPPGAVGAPGPQGFQGPAGEPGEPGQTGPAGARGPPGPPGKAGEDGHPGKPGRPGERGVVGPQGARGFPGTPGLPGFKGIRGHNGLDGLKGQPGAPGVKGEPGAPGENGTPGQTGARGLPGERGRVGAPGPAGARGNDGSVGPVGPAGPIGSAGPPGFPGAPGPKGELGPVGNPGPAGPAGPRGEVGLPGVSGPVGPPGNPGANGLPGAKGAAGLPGVAGAPGLPGPRGIPGPAGAAGATGARGLVGEPGPAGSKGESGNKGEPGAAGPQGPPGPSGEEGKRGPNGEVGSAGPPGPPGLRGNPGSRGLPGADGRAGVMGPPGSRGPTGPAGVRGPNGDSGRPGEPGLMGPRGFPGSPGNVGPAGKEGPAGLPGIDGRPGPIGPAGARGEPGNIGFPGPKGPTGDPGKNGEKGHAGLAGARGAPGPDGNNGAQGPPGPQGVQGGKGEQGPAGPPGFQGLPGPAGTAGEVGKPGERGIPGEFGLPGPAGPRGERGPPGESGAAGPAGPIGSRGPSGPPGPDGNKGEPGVLGAPGTAGPSGPSGLPGERGAAGIPGGKGEKGETGLRGDVGSPGRDGARGAPGAVGAPGPAGANGDRGEAGPAGPAGPAGPRGSPGERGEVGPAGPNGFAGPAGAAGQPGAKGERGTKGPKGENGPVGPTGPVGAAGPAGPNGPPGPAGSRGDGGPPGATGFPGAAGRIGPPGPSGISGPPGPPGPAGKEGLRGPRGDQGPVGRTGETGASGPPGFAGEKGPSGEPGTAGPPGTPGPQGILGAPGFLGLPGSRGERGLPGVAGSVGEPGPLGIAGPPGARGPPGAVGNPGVNGAPGEAGRDGNPGSDGPPGRDGQAGHKGERGYPGNPGPAGAAGAPGPQGAVGPAGKHGNRGEPGPAGSVGPAGAVGPRGPSGPQGIRGEKGEPGDKGPRGLPGLKGHNGLQGLPGLAGHHGDQGAPGPVGPAGPRGPAGPSGPAGKDGRTGQPGAVGPAGIRGSQGSQGPAGPPGPPGPPGPPGPSGGGYDFGYEGDFYRADQPRSPPSLRPKDYEVDATLKSLNNQIETLLTPEGSRKNPARTCRDLRLSHPEWSSGYYWIDPNQGCTMDAIKVYCDFSTGETCIRLNLKTSQPKTGTETPRSRSTSG

SEQ ID NO: 275 - protein, 631 aa, Sus scrofa
MKLIAILFLCSRLLPSLTQESSQEIDCNHQDVFKAVDTALKKYNSGNKSGNQFVLYRITEVTKIDNPDIFYSFKYEIKEGDCLVQSDKTWQDCDYKDPAQAATGECTVTVAKRGNEKFSVATQTCQITPAEGPVVTAQYDCLGCLHPISTSSPELQPVLRHTIQHFNNKSDHLHLFHLHEIKSAQRQVVAGWNYEINYLIVQTNCSKEKFPSLTPECTSLSNGDIHECTDKAHVDLQLRVASFSQECSLYQGKDFVQPLVKICAGCPRDIPVNSPELEEPLNHSIAKLNAENNAVFYFKIDLVEKATVQVVAGKKYSIVFTARETTCSKQSNEELTESCEIKKPGQILKCNASVYVVPWEKKIYPTVKCQLLGQTSLMKRPPGFSPFRSVQVEKTKEGVTVSLPHSSMAPIQDEEQDSGKEQRPAHGHDWGHGKPIKPGLGHGHKYKPGQGHGHHKGHGLGHGHQKQHGLGHGHPRGHGLAHGHEHGHGHEKHKNKGKNNGKHNGSKKEHLSSSHEDCTTSSAQTQEKTEGPTPLPSLAQPGVAVTIPDFQDSDLIATVMLSTAPPPTESDDDWIPDIKIEPNSLSFKPISDFPETTSPKCPGRPWKPVNGVNPTVEMKELHDFSLSDAFY

SEQ ID NO: 276 - protein, 553 aa, Sus scrofa
MRLLNAVPLFILLITLQCSRAVSPTGCDDAEPVARKALDLINKGRWDGYLFELLQVADAHLDKSESTAVYYLVLHVKESDCPVLSRKHWDDCEPAVSTRPSDIVIGQCKVIATTCLDGSQDLRVNGFNCTTSSASSVLANTKDSPVLIDFFEDTEPYRKEANQTLEKYKRENSDFASFRVDKVERVARVRGGERTNYYVDFSVRNCSSRWRSPTFGFCRADFINDAEASDLENPEDIVINCEVFNFKDHRNISGGQKHLGHRFHSGEHEHSPAGRPPHKPGRSRDHHDSHKPHKFGCPPPLGDKSHSDSPPFQAEASPSLASLGTNGVHGPSDNHSSSEHHLPGHPPHGRHPHGPPPHGRHPHGPPPHGRHPHGPPPHGHHPHGPPPHGHHPHGPPPHGHHPHGPPPHGRHPHGPPPHGHHPHGPPPHRHHPHGHDFHDYGPCDPPPHSQDPQDHHRWGHGPPPRHSEERGPGKKHFPFHGREIGYVHRLPPLKKGEVLPLPEANFPSFLLPHHKPLQPEIQPFPQSASESCPGTFRGEFSHLSKFFAHTFPK

SEQ ID NO: 277 - protein, 377 aa, Sus scrofa
MGLLLPLVLCALAVGCGATSPPQPLPPTSSLLLSHACNSSYVLDVVNLVLQEINRNQKDGYVLSPNRVSDVREHRQGDLGSLFYLTLDVIESSCHVLSKMSWKDCGLTPFHESEYGQCKAIFYINKARRIHYLPAYNCILRPVSPGQLVTLCPDCPTHVNMSDTKVLEAATKSLEEFNKRRTSKKYSLVKVTRALFQWVFGPAYFVEYLIKESPCTKSQASSCALQPPNPEPVGICSGSRSERGPEKFVSVRCSFFKSQAPTPGDAYSTASRGDPTKVEEPQQESTASAKPVPKGSVQHLPGLGDKPKGSPETGPEEAFPVRVDLTSNPQGEPLDVSFLFPEPVEKDLVVLPFPSREWRSAECPGPARVSNPLVLPP

SEQ ID NO: 278 - protein, 365 aa, Sus scrofa
MKVLILFFCLAQLWGCRAVPHGPILGYREPACDDVETEQAALAAVDYINKHLPRGYKHTLNQVDSVKVWPRRPAGEVFDIEIDTLETTCHVLDPTPLANCSVRQLTEHAVEGDCDFHVLKQDGQFSVLFAKCDSSPDSAEDVHKVCPNCPLLAPLNDSRVVHAAESALAAFNAQSNGSYLQLVEISRAQLVPLSASVSVEFAVAVTDCVAKEVIDPTKCNLLVEKQYGFCKGTVTAKVNEEDVAVTCTVFQTQPVVLQPQPAGADAGATPVVDAAATASPLADVPAASLVVGPMVVAVPPGIPPVHRSHYDLRHSFSGVASVESASGEAFHVGKTPKGAQPSIPAADGSVPVVRPCPGRIRHFKI

SEQ ID NO: 279 - protein, 316 aa, Sus scrofa
GGYGGGVGAGFGFGGGARSGFGFGAGSGGFGLGGGAGFVGGYGGSGFPVCPPGGIQEVTINQNLLTPLNLQIDPTIQRVRTEEREQIKTLNNKFASFIDKVRFLEQQNKVLDTKWTLLQEQGIKTVRQNLEPLFEQYINDLRRQLDSILGERGRLDSELRSMQDLVVDFKNKYEDEINKRTAAENEFVNLKKDVDTAYMNKVELQAKVDSLTDEINFLRAFYDAELAQMQTHISDTSVVLSMDNNRNLDLDSIIAEVKAQYEDIAQRSRAEAESWYQSKYEELRVTAGRHGDDLRNTKQEISEINRMIQRLRSEID

SEQ ID NO: 280 - protein, 541 aa, Sus scrofa
MSRQSTITFQTGSRRGFSTASATTPTTSRSRFSSVSVTRSPGGSGGLGKISGAGAGFGSRSLYNLGGTKRVSISGCGSSFRSGFGGRASGGFGVSGGFGYGGGIGGGYVGIQEVTVNQSLLTPLNLQIDPTIQRVRKEEREQIKTLNNKFASFIDKVRFLEQQNKVLETKWSLLQEQGTRTVRQNLEPLFDAYVNDLRRQLDNVTTERGRLDAELRNMQDVVEDFKVRYEDEINKRTAAENEFVALKKDVDAAYMNKMELEAKVNSLTDEINFLQMLFEAELSQMQTHVSDTSVVLSMDNNRSLDLDSIIAEVKAQYEDIANRSRAEAESWYQTKYEELQVTAGRHGDDLRNTKQEISETNRMIQRLRAEIDSVKKQCASLQTAIADAEQRGELALKDARAKLVDLEDALQKAKQDMARLLHEYQELMNIKLALDVEIATYRKLLEGEECRLSGEGVSPVNISVVTSTISSGYGAGSGIGGSSLGVSGGSGYSFTTSGGHSLGTSLGGSGFSASSSRGLRGSGSSVKFVSTTSSSRKSYKH

SEQ ID NO: 281 - protein, 255 aa, Sus scrofa
MQPLLLLVALLLPPGARAGEIIGGQEARPHSRPYMAYMHFQSAQGQKTCGGFLVRKDFVMTAAHCFGRQTVVILGAHNIRRFERTQQRISVLRAIPHPRYNPYNHLNDIMLLQLANRTRQNRFVRPVALPRTQARLSPGARCTVAGWGLVSLSRRTDTLQEVQLTVQRDGECHRRFDHYNGRIQMCVGDPRERKSAFLGDSGGPLVCGRVAQGIVSYGNRQGTPPAVFTRVSSFLPWIRRTMSRFQQRGQAEIPL

SEQ ID NO: 282 - protein, 546 aa, Sus scrofa
MSSFREMQLPNGFFSELDTMADNRDPASDQMKHWKEQRAAQKPDILTTGSGNPIGDKLNILTAGPRGPLLVQDVVFTDEMAHFDRERIPERVVHAKGAGAFGYFEVTHDITRFSKAKVFEHVGKRTPIAVRFSTVAGESGSADTVRDPRGFAVKFYTEDGNWDLVGNNTPIFFIRDAILFPSFIHSQKRNPQTHLKDPDMVWDFWSLRPESLHQVSFLFSDRGIPDGHRHMNGYGSHTFKLVNEKGEAVYCKFHYKTDQGIKNLSVEDAARLSQEDPDYGIRDLFNAIATGNYPSWTFYIQVMTFQEAEAFPFNPFDLTKVWPHSEYPLIPVGKLVLNRNPVNYFAEVEQMAFDPSNMPPGIEPSPDKMLQGRLFAYPDTHRHRLGPNYLQIPVNCPFRARVANYQRDGPMCFQDNQGGAPNYYPNSFSAPEQTHSALEHCTRYSGDVQRFNSANEDNVTQVRTFYLNVLNEEERKRLCENIAGHLKDAQLFIQKKAVKNFSDVHPDYGARIQALLDKYNAEKPKNAVHTYVQAGSHLAAREKANL

SEQ ID NO: 283 - protein, 773 aa, Sus scrofa
MGLGASLFKAWLIISVWGLGVDPSLQIDVLTELELGESTTGVRQVPGLHNGTKAFLFQDTPRSIKASTATAEQFFQKLRNKHEFTVLVTLKQTHLNSGVILSIHHLDHRYLELESSGHRNEVRLHYRSGSHHPHTEVFPYILADDKWHKLSLAISASHLILHIDCNKIYERVVEKPSTDLPVGTTFWLGQRNNAHGYFKGIMQDVQLLVMPQGFIAQCPDLNRTCPTCNDFHGLVQKIMELQDILAKTSAKLSRAEQRMNRLDQCYCERTCTTKGITYREFESWTDGCKNCTCLNGTIQCETLICPNPDCPLKSALAYVDGKCCKECKSVCQFQGQTYFEGERNTVYSSSGVCVLYECKDQTMKLVESSSCPALDCPESHQITLSHSCCKVCKGYDFCSERHNCMENSVCRNLNDRAVCSCRDGFRALREDNAYCEDVDECAEGRHYCRENTMCVNTPGSFMCICKTGYIRIDDYSCTEHDECITNQHNCDENALCFNTVGGHNCVCKPGYTGNGTTCKAFCKDGCRNGGACIAANVCACPQGFTGPSCETDIDECSDGFVQCDSRANCINLPGWYHCECRDGYHDNGMFSPSGESCEDIDECGTGRHSCANDTICFNLDGGYDCRCPHGKNCTGDCVHDGKIKHSGQIWVLENDRCSVCSCQNGFVMCRRMVCDCENPTVDLFCCPECDPRLSSQCLHQNGEIYTTAVTPGSRIASSAAACKGKLTVGPCHAQRWSVNSVSSQRMSAAHAVSPTLAKLTPSAMTSPKLAWTR

SEQ ID NO: 284 - protein, 907 aa, Sus scrofa
MKTLSPTGAYGLLLVLPLLLAVLQSTTAHKNDINIYSLTVDSKVSSRFAHTVVTSRVVNKGSAVQEATFQMELPKKAFITNFSMIIDGVTYPGNIKEKAAAQEQYSAAVARGESAGLVRATGRKTEQFQVAVSVAPAAKVTFELVYEELLARHLGVYELLLKIQPQQLVKHLQMDIHIFEPQGISFLETESTFMTNELAEALTISQNKTKAHIRFKPTLSQQQKSPEQQETVLDGNFIVRYDVNRTVTGGSIQIENGYFVHYFAPEGLSAIPKNVVFVIDTSGSMRGRKIQQTREALIKILGDLGSRDQFNLVSFSGEATQWKKGLLPASAENVEEAKSYAAEIHAQGGTNINDAMLMAVQLLERANREELLPARSVTLIILLTDGDPTVGETNPSKIQKNVREAIDGQHSLFCLGFGFDVSYAFLEKMALENGGLARRIYEDSDSALQLEDFYQEVANPLLRLVAFEYPSNAVEAVTQDNFRLFFKGSELVVAGKLRDQSPDVLSAKVRGQLHMENVTFVMESRVAEQEAEFLSPKYIFHSFMERLWAYLTIQQLLAQTVSASDAEKKALEARALSLSLNYSFVTPLTSMVITKPEGQEQSQVAEKPVENGNRQGNTHSGHSSFQFHSVGDRTSRLTAQGFEKMSYLPPRLGPPGPLQPTRFSHPFSRITLDRVLPEVLSVPDETSHDMDSRIIGATIPPPPARIQAPSVILPLPGQSVDQLCVDLKHSQGPVKLLSDPGQGVEVTGHYEREKARFSWIEVTFKHPPLQVRASLEHIVVIRNRQSSAYKWKETLYSVMPGLKITMDKAGLLLLSSPNRVTIGLLSWDGPGKGLRLLLRDTDHFSSQISGTFGQFYQDVVWGPPAAADDSKRTVTVQGHDHSATRELKLDYQEGSPGKEISCWTVVL

SEQ ID NO: 285 - protein, 882 aa, Sus scrofa
MASARWPCLILALLSSLAVSGFPRSPSRQLGVVNGIEVYSTKVSCKVTSRFAHNVVTTRAVNHADTAKEVSFDVELPKTAFITNFTLTIDGVTYPGNVKEKEVAKKQYEKAVSQDKTAGLVKASGRKLEKFTVSVNVAAGSKVTFELTYEELLKRHKGKYEMYLKVQPKQLVKHFEITADIFEPQGISTLDAEASFITNDLLGSALTKSFSGKKGHVSFKPSLDQQRSCPTCTDSLLKGDFIITYDVNRESPANVQIVNGYFVHFFAPQGLPVVPKNVVFVIDVSGSMYGRKMEQTKDALLKILDDIKEDDYLNFVLFSGDVTTWKDSLVQATPENIQKAREFVRNIRDQGMTNINDGLLTGISMLNKAREEHKVPERSTSIIIMLTDGDANMGVSKPEKIQENVRNAIGGKFPLYNLGFGNNLNYNFLESMALENHGLARRIYEDSDANLQLQGFYEEVANPLLTSVEVGYPENAIQDLTQNTYQHFYDGSEIVVAGRLADEDMNSFRADVKGHGAINDLTFTEEVDMKEMEEALKERDYIFGNYIERLWAYLTIEQLLEKRKNAQGKEKETLTAQALDLSLKYHFVTPLTSMVVTKPEDNENQTAIADKPGEEPVDAVTPSTAYLTSYQPPVTPYYYVDGDPHFIIQVPEKDDAICFNIDEDPGTVLRLIQDPVTGLTVNGQIIGEKRSSQDSQPRKTYFGKLGIANAHLDFRIEVTPERITLWNGAAQSTFSWLDTVMVTQDGLSVMINKKNMVVSFGDGATFVVVLHQVWKKQPNHHDFLGFYVVDSHRMSTQTHGLLGQFFHPFDFKVSDIHPGSDPTKPDATMVVKNHRLTVTRGSQKDYRKDASIGVKVACWFVHDNGQGLIDGIHSDYIVPDLF

SEQ ID NO: 286 - protein, 902 aa, Sus scrofa
MDGTMGLQGLLCLCLASHLALQAMPTQGSPTDSTKGNKAVNGVVIRSLKVNCKVTSRFAHYVVTSQVVNNANKAKEVAFDVEIPKTAFISDFAITADENTFVGDIKDKVTAWKQYRKAAISGENSGLVRASGRTMEQFTIHVTIGPRSKATFQLTYEEVLRRKLTQYDIVIKVKPKQLVQHFEIDVDIFEPQGISKLDAQASFLSKEAAAQLIKKSFSGKKGHVLFRPTVGQQQSCSTCSTTLLNGDFKVTYDVNREKLCDLLVANNYFAHFFAPQNLTKLNKNVVFVIDISSSMEGQKVKQTKEALLKILSDLKPGDYFDLVLFGSAVQSWRGSLVQASTANLDAARSYVRQFSLAGSTNLNGGLLRGIEILNKAQGSLPEFSNRASILIMLTDGEPTEGVTDRSQILKNVRDAIRGRFPLYNLGFGHDVDWNFLEVMALENNGRAQRIYEDHDAAQQLQGFYDQVANPLLKDVELQYPADAVLALTQHRHKQYYEGSEITVAGRIADNKLSSFKADVQASGDQGFKTTCLVDEEEMKKLLQERGHMLENYVERLWAYLTIQELLAKRMKLEGAEKASVSAKALQMSLDYQFVTPLTSMTIRGMADKDGLEPVIDKPLEDSQPLEMLGPRRKFVLSASQPSPTHPSSSIQKLPDRVTGVDTDPHFIIRVPQKEDTLCFNINEEPGVVLSLVQDPDTGFSVNGQLIGNEARSPGKHEGTYFGRLGIANPATGFQLEVTPQNITLNPGSGGPVFSWRDQASLRQDEVVVTINRKRNLVVSVEDGGTFEVVLHRVWKGSAIHQDFLGFYVLDSHRMSARTHGLLGQFFHPFDYKVSDLHPGSDPTKTDATMVVKNRQLTVTRGLQKDYSKDPRHGAKVTCWFIHNNGDGLIDGVHTDYIVPDIF

SEQ ID NO: 287 - protein, 531 aa, Sus scrofa
MPKPHSDAGTAFIQTQQLHAAMADTFLEHMCRLDIDSPPITARNTGIICTIGPASRSVETLKEMIKSGMNVARLNFSHGTHEYHAETIKNVRAATESFASDPILYRPVAVALDTKGPEIRTGLIKGSGTAEVELKKGATLKITLDNAYMEKCDENVLWLDYKNICKVVDVGSKVYVDDGLISLLVKQKGPDFLVTEVENGGFLGSKKGVNLPGAAVDLPAVSEKDIQDLKFGVEQDVDMVFASFIRKAADVHEVRKVLGEKGKNIKIISKIENHEGVRRFDEILEASDGIMVARGDLGIEIPAEKVFLAQKMMIGRCNRAGKPVICATQMLESMIKKPRPTRAEGSDVANAVLDGADCIMLSGETAKGDYPLEAVRMQHLIAREAEAAIYHLQLFEELRRLAPITSDPTEAAAVGAVEASFKCCSGAIIVLTKSGRSAHQVARYRPRAPIIAVTRNHQTARQAHLYRGIFPVVCKDPVQEAWAEDVDLRVNLAMNVGKARGFFKKGDVVIVLTGWRPGSGFTNTMRVVPVP

SEQ ID NO: 288 - protein, 623 aa, Sus scrofa
MAHVGGLWLPGCLALAVLVSLVHSQHVFMAPQQALSLLQRARRANSGFFEEMRKGNLERECVEEQCSREEAYEALESPSETDAFWAKYTACESVRKSREKLVECLEGNCAEGLGMNYRGNISVTRSGIECQLWRSRYPHKPEVNSTMYPGADLRENFCRNPDGSITGPWCYTTSPTVRREACSIPVCGQGRVTAELIPRSGGSTVNVSPPLETCVPERGRQYQGRLAVTSHGSPCLAWGSSQAKALSKDQDFNPAVPLVENFCRNPDGDQEGAWCYVAGQPGDFEYCDLDYCEEPVDEEVGDALGENADAAIEGRTTADDFQPFFNEKTFGAGEADCGLRPLFEKSSLEDKTEKELFESYIEGRIVEGSDAEIGLAPWQVMIFRKSPQELLCGASLISDRWVLTAAHCLLYPPWDKNFTENDLLVRIGKHSRTRYERNIEKISMLEKIYIHPRYNWRENLDRDIALLKLRKPITFSDYIHPVCLPDKETATKLLRAGYKGRVTGWGNLKETWTTSASEVQPSVLQVVNLPIVERLVCKASTRIRITDNMFCAGYKPDEGKRGDACEGDSGGPFVMKSPFNNRWYQMGIVSWGEGCDRDGKYGFYTHVFRLKKWMQKVIDRFGG

SEQ ID NO: 289 - protein, 381 aa, Sus scrofa
MFLKAVVLSLALVAVTGARAEVNADQVATVMWDYFSQLGSNAKKAVEHLQKSELTQQLNTLFQDKLGEVNTYTEDLQKKLVPFATELHERLTKDSEKLKEEIRRELEELRARLLPHATEVSQKIGDNVRELQQRLGPFTEELRTQVNTQVQQLQRQLKPYAERMESVLRQNIRNLEASVAPYADEFKAKIDQNVEELKGSLTPYAEELKAKIDQNVEELRRSLAPYAQDVQEKLNHQLEGLAFQMKKQAEELKAKISANADELRQKLVPVAENVHGHLKGNTEGLQKSLLELRSHLDQQVEEFRLKVEPYGETFNKALVQQVEDLRQKLGPLAGDVEGHLSFLEKDLRDKVNTFFSTLKEEASQGQSQALPAQKAQAPLEG

SEQ ID NO: 290 - protein, 491 aa, Sus scrofa
MAFRLTPLTLLLLLLLLAGDRASSTLNDVSHVDPGSSEEGKNEGDIAKGDISKIVSIQPTKSSSIFPTNLTIVTTSATQPVNQSTTQPIEPTTLPTTKPFLTTTEPFLPTTKPFCPVPSISCPEESHSAEAVLGEALTDFSVRLYHAFSAIKKAGTNMVFSPFSIASLLTHVLLGAGDETKGNLENLLSYPKDFTCVHQALKAFRSEGFTSVSQIFHSPDLAIRDTFLNASQSLYGSSPRTLGNDSNVNLELINAWVAEKTNHRINQLLNSLPSETRLVLLNAIYLSAKWKVMFNHKKTSLEAFYSKSSEIKVHMLTSKKYPVAHFTDPTLKAKVGRLQLSHNLSLVILVPQTLKHRLEDMEKALSAPVFKAVMNKLESTKFYPTHFMMPRIKIKGNQDMLPIMEKLEFFDFTYDLNLCGLTEDADLQVSTMQHQAMLELMETGVEVAAASAFSVARSLLVFEVQQPFLFVLWDQHHKFPVFMGRVYDPRS

SEQ ID NO: 291 - protein, 633 aa, Sus scrofa
MRVLGGRCGALLACLALALPVLEANFLSKQHASQVLIRKRRANSMLEERKQGNLERECIEELCSKEEAREVFENDPETEYFYPAYLACLGSFRAGLFTAARLSTNAYPDLRSCVNAIPDQCNPLPCNEDGYLTCKDGQAMFTCICKSGWEGEKCELDINECKDPANINGGCSQICDNTPGSYHCSCKSGFIMLSNKKDCKDVDECSENMCAQLCVNYPGGYSCYCDGKRGFKLAQDQKSCEAVPVCLPLNLDKNYELLYLAEQFVGVVLYLKFRLPEITRFSAEFDFRTYDSEGVILYAESSDHSAWFLIALRDGKIEIQFKNEHTTKITTGGRVINDGLWNMVSVEELEQSISVKIAKEAVMNINKPESLFKPTNGFLETKVYFAGLPRKVENALIKPINPRLDGCIRGWNLMNQGASGVKEIIQEKQNKHCLVTVEKGSYYPGSGVAQFSIDYKNVSSAGAWQVNVSLNIRPSAGTGVMLALVSGNTVPFALSLVDSATEKLQDIVVSVENVEIARIKALSLCSSLQSLLEMRVSVNSLELLTQFEKRRISSEDYQGQFAILDKAMEGTVATYLGGLPDVPFSATPVNAFYNGCMDVIINGVPLDLDEAIAKHNDIRAHSCPSVWKNTRNT

SEQ ID NO: 292 - protein, 601 aa, Sus scrofa
MSQGNKMLLTFHTDFSNEENGTIMFYKGFLAYYQAVDLDECAFQHNSGEDNAQQPRCQHLCHNYIGGYFCSCHLGYELQEDGHSCQAECSRELFTEPSGYISSLEYPQPYPPDLRCNYSIRVERGLTIHLKFLEPFEIDDHQQVHCPYDQLQIYASGRNIGEFCGSQRPAPIDTNSNAVDLLFFTDESGDSRGWKLHYTTEIIKCPQPKTLDTFTVIQDLQPQYEFRDYFIASCKQGYQLMEGKQVLLSFTAVCQDDGTWHRAMPRCKIKDCGRPKSLPNGDFNYITTKGVNTYQARIQYYCREPYYKMHTGGGSSKSERGAYTCSAQGVWMNELEGETMPRCLPVCGKPVNPVEEKQRIIGGRKAKPGSFPWQAFTNIYGHGGGALLGDRWILTAAHTLKPKEYDEQNNASVDVFLGHVNVDEITKLGNHPVRRFIIHPDYRQEDSHSFEGDIALLELENSVTLGPDILPICLPDNDTFYDWGFMGYVSGFGITERKLSHDLRYVHLPIAKREMCQSWLQKKNRNDVFSRNMFCAGSPTLKQDSCQGDSGGVFAMKDEKNDQWVAMGIVSWGIGCGEGYGFYTKVLNYVDWIKKEMEKAG

SEQ ID NO: 293 - protein, 1504 aa, Sus scrofa
MERNKLLHPSLTLLLLLFLPTDASVSGKPQYLVLVPSLLHTGTPEKGCLLLSHLNETVTVSASLESLRENRSLFTNILAEKDLFNCVSFTVPRSSSHEEVMFLTVQVKGATQEFKKRTTVLVKNEESLAFVQTDKPIYKPEQTVMFRVVLLDENFHPLNKLIPLVYVEDPKGNRIMQWQHLQVENGLKQLSFPLSSEPFQGSYKVVVQQESGETAEHPFTVEEFVLPKFEVQVRTPQIITILEKAVNVSVCGLYTYGKPVPGHVTISICRKYSNPSTCFGGESQAICEKFSGELNSQGCFSQSVETKVFQMKRQEFEMKLEVEAKIKEEGTEVELTGKGSTEITRTITKLSFVKVDSYVRRGIPFFGQVRLVDGKGVPVPKKVIFITANEAKYESNATTDEHGLVQFSINTTEIMGTSLTIRVKHKDHSPCYGYQWVSEEHEEAYHTANLVFSQSKSFVHLEPVPQELPCGQTQTVQAHYVLNGQVLRELKELVFYYLIMSKGGIVRAGTHTLPVEQGDMKGSFSLSFPVEADLAPIARLLIYAILPDGEVVGDSAKYEVENCLPNKVGLHFNPAQGLPGSHAHLQVTASPKSLCGLRAVDQSVLLLKPEAELSPTTVYNLLPVKDLNSFPESLNQQEEDNEDCISQHNVYINGIMYSPVSNTNEKDVYSFLQDMGLRVFTNTKIHKPKICSPLPLYEMQTSRRLLASPALAEMDRGGHALMNMVRISEPLATETVRKYFPETWIWELVPVNDSGVAEIEVTIPDTITEWKAGALCLASDIGLGLSPTASLQAFQPFFVELTMPYSVIRGEGFTLKATVFNYLPKCIRVSVHLMDSPAFLAVPEEKEEKAHCICGNGRQTVSWAVTPKSLEKVNFTVTAEALSSQELCGTEAAMVPEYGRKDTIIKSLLVEPEGLEKEVTFNSLLCPSDAGASEQLSLKLPPNVVEDSARAFFSVLGDLLGSAMRNTQNLLQMPYGCGEQNMVLFAPNIYVLDYLNETQQLTAEIKSKAIRYLNTGYQRQLLYKHYDGSYSTFGEHYGRSEGNTWLTAFVMKTFAQARTYIFIDETHITEALTWLSQKQKDNGCFRSSGSLLNNAIKGGVDDEVTLSAYVTIALLEIPLAVTHPVVRSALFCLETAWKSAQEGSQGSHVYTKALLAYAFALAGNQEKKKEVLQSLDAEAVKEGDSIHWTRPRKPEAPVQHFYKPRAPSAEVEMTAYVLLTCLTAQSALSSEDLNLATLIMKWITKQQNSQGGFSSTQDTVVALHALSKYGAATFTRTGKAAEVTIQSTGTFSKKFQVNNDNLLLLQQISLPAVPGEYSITATGKGCVYLQTSLKYNILPKKEDFPFALEVQTLPPTCEPKAHTSFQISVNVSYTGSRPASNMAIVDVKMVSGFIPLKPTVKMLERSDNVSRTEVSSNHVLIYLDKVTDQSLSMSFTVTQDIPVRDLKPAIVKVYDYYETAEFAIAEYNAPCSKGKQFTFFPDGVTTLLVCPSHLLHKSLAKYFA

SEQ ID NO: 294 - protein, 706 aa, Sus scrofa
MERAAPSRRVPLPLLLLGGLSLLAAPAGAEVPMEACCTDGHQMATQHKDCSLPYTSESKECRMVQEQCCQNQLEELHCAAGISLADEGDSCAAPQGDNASLEAMIVKRCCHCCLLGRAAQAQGQSCEYNLMVGYQCGLVFRACCVKGQENADFAPGDIGDLQETAKVSEIEEEQEDPYLNDRCRGGGPCKQQCRDTGQEVVCSCFVGYQLLPDGVSCEDINECIKGSQNCRLGETCINTVGSFRCQRDSSCGTGYELTEDNDCKDIDECESGIHNCLPDFICQNTLGSFRCRPKLQCKSGFIQDALGNCIDINECLSISAPCPVGQTCINTEGSYTCQKNVPNCGRGYHLNEEGTRCVDVDECSPPAEPCGPGHMCVNSLGSFRCECKAGYYFDGISRTCVDINECRRYPGRLCGHKCENTPGSYYCSCTIGFRLSSDGRSCEDVNECHSSPCSQECANVYGSYQCYCRRGYQLSDVDGTTCEDIDECALPTGGHICSYRCINIPGSFQCSCPSTGYRLAPNGRNCQDIDECVTGIHNCSINETCFNIQGSFRCLAFECPENYRRSADTLRQEKTDTIRCIKSCRPNDVTCVLAPVHTISHTVVSLPTFREFTRPEEIIFLRAVTPAHPANHADIIFDITDGNLRDSFDIIKRYMDGMTVGVVRQVRPIVGPFHAVLKLEMNYVVGGVVSHRNVVNVHIFVSEYWF

SEQ ID NO: 295 - protein, 1620 aa, Sus scrofa
MVYHYLQHGPVGHTLFFNLPGENLGPGTNIQPKQLLGKPNSVSHVYLDIVSKHFSRSKKIPVTYDNGFLFIHTDKPVYTPHQSVKVRVYSLNDELKPAKRETVLTFIDPQGSEVEVLEENDYTGIISFPDFKIPSNPKYGVWTIQAKYREDFSTTGTAYFEIKEYVLPHFSVSIEPENNFIGYKDFNDFEITVKARYFYNKVVSEADVYMFFGIREDLKDEQKVMMQKAMRNTMLINGIAKVTFNSETAIKELSYDSLEDLNNKYLYIGVTVIESTGGFSEEAEIPGIKYVLSPYKLNLVATPLFVKPGIPYSIKVQVKDSLDLLVGGVPVILSAQTLDANQETSDLESKKSVTRSRDGVASFVVNLPAGVTVLEFNIRTEDPDLPDENQARANYRAIAYSSLSQSYLYIEWTQNYKPVLVGEHLNVVVTPKSPYIDKITHYNYLILSRGKIVHFGTREKLSNSAYQSINIPVTQNMVPSARLLVYYIVTGEQTAELVSDSVWLNIEEKCGNQLQVHLSPNTDTYSPGQHVSLNLVTELDSWVALSAVDKAIYGVQMTAKKPLERVFQTFEKNDLGCGAGGGRNNADVFHLAGLTFLTNANTDDIRENDEPCKDILRPKRMLQKKIEEEAAKYKYAMLKKCCYDGAYRNDDETCEERAARIKIGPKCVKAFKDCCYIANQVRAEESHKNIQLGRLHIKTLLAVTNPEIRSYFPESWLWEVHHVPRRNQLQFVLPDSLTTWEIQGIGISNSGICVTDTLNAKVLKDVFLEMSIPYSVVRGEQIQLKGTVYNYGTSGVLFCVKMPPVEGICSSGSPGIDPQGKKSSRCQPQKIEGSSSHLVTFDVLPLEIGLHNINFSLETSLGREILVKTLRVVPEGVKRESYAGITLDPRGIYGAMTRRKEFPYRVPLDLVPKTKVKRIVSVKGLLIGEVMSAVLSQEGIDILTHLPKGNAEAELMSIVPVFYVFHYLEAGNNWNIFSSNSLAQRQNLQKKLREGVVSVMSFRNADHSYSMWKSGSASTWLTAFALRVLGQASKYIDQDLNSICNSILWLVEKCQLGNGSFKENSEYQPIKLQGTLPIEAQENTLYLTAFAVIGIRKAFDLCPLMKISMALTKADTFLLENTRSTRSTFALAIAAYALSLGDKSHPQFRSIVSALKKEALVKGNPPIYRFWKDDLQKKDRSVPNTGTARMVETTAYALLTSLNLKDMNYVNPIIKWLSEEQRYGGGFYSTQDTINAIEGLTEYSLLIKNFLLNMDVKVSYKHRGDFYHYKITEKNFIGRPVEVPLNDDLVVFSTGQNSGLATVHVKTVVHKTSTSEEVCSFDLKIEIQDIEASSYSSSEYKRIVACASYKPSREESSSGSSHAVMDISLPTGVNANAEDLRALVEGVDQLLTDYEIKDGHVICQLNSIPSNNFLCVRFRIVELFQVGFLSPATFTVYEYHRPDKQCTMFYSMSQTKLQKVCEGVTCKCVEADCGQMQTEVDLTISVNTRKETACKPEIAYVYKVKIIAMTEESAFVKYTASLLDVYKAGEAVAEKGSEITFIKKTTCTNANLEKGKQYLIMGKEALQIKHNFNFKYIYPLDSSTWIEYWPTDTACPSCQTFLANLDEFTEDIFLNNCENA

SEQ ID NO: 296 - protein, 930 aa, Sus scrofa
GQHSVLYFILLSGLIDKSQACFCDHYPWTQWSSCSKTCNSGTQTRQRQITINQYYLDNFCDRLCTKQETRECNWQTCPINCLLGDYGPWSDCDPCVEKQFKVRSILHPNQFGGQPCTEPLMTFRPCIPSKLCKIEEVDCKNKFRCDSGRCIASKLECNGENDCGDNDERNCGRTKAVCSRKYNPIPSVQLMGAGFHILAGEPRGEVLGNSFTGGICKTVKSSKASNPFRVPANLENVTLRVQTKEDDFETDFYEDLIPLENSKDQQATGFGQEKSSFHVPIFYSSKKSQTSSHNSAFKQAIQASHKKDSSFIRIHKVIKVLNFTMKTKDLQLSDVFKALNHLPLEYNAALYSRIFDDFGTHYFTSGSLGGVYDLLYQFSNEELKNSGLTQEEAKNCIRIETKKRYFIVTKTKVEHRCTTNRMSEKYEGSFLQGSEKSISLVKGGRSEYAAALAWEKGSSGPGEKTYSEWLESVKENPAVIDFELAPITDVRNIPCAVTRRNNLRRAFREYAAKFDPCQCAPCPNNGRPVLSGTECLCVCQSGTYGDNCERRAPDYKSNAVDGNWGCWSSWSTCDATYKRSRTRECNNPAPRQGGKPCGERRQEEHCTFSIMQNTGQPCIGDDEDMKEIDLPEIESDSGCPQPVPPENGFIRNEKTLYSVGEDVEIVCLTGFKTVGYQYFRCLPDRTWRRGDVECQRTDCLLPVVPEVLKLSPFQRLYKIGDSIELSCPKGFVIAGPSRYTCSGDSWTPPISSSLTCEQDFLTRLKGHCQPGQKQLGSECVCLSPEEDCSHHSEDLCVLDTDSNHYFTSSACKFLAEKCLNNQQLQFLHIGSCQDGPQLEWGLERIKLSSSSTKNESCGYDTCYSWEKCSATTSKCICLLPFQCLKGGYQHYCVKMGSSTTTRTMNICEVGAIRCALRKMEILYPGRCRSN

SEQ ID NO: 297 - protein, 841 aa, Sus scrofa
MKAMSLVFLVGLIGEFQVFSSASSPVNCQWDSYAPWSECNGCTKTQTRRRPIAVYGQYGGHPCVGSMFETQSCEPTRGCPTEEGCGERFRCFSGQCISKSLVCNGDSDCEEDSADEDRCEDSESRPSCDLSKPPPNIELTGNGYNALTGQFRNRVLNTKSFGGQCRKVFSGDGRDFYRLSGNVLSYTFQVKVNNDFNYEFYNSTWSYAKHTSTEHTSSSKGRVFIFSSSSSSSSYYAKTYEILKKKSYQLLVVQNTVEVAQFINNNPEFLQLAESFWKELSYLPPLYDYSAYRLIDQYGTHYLQSGSLGGEYKVLFYVDSEKVAESDLSSEDKKKCASSHISFLFKSSKHKCKAMEEALKSASGTQSNVLRGVPFVRGGRPGFVSGLSYLELDNPDGNKQRYSSWAGSVTDLPQVIKQKLTPLYELVKEVPCASVRLYLKRALEEYLDEFDSCHCQPCQNGGMASVEGTQCQCHCKPNTFGVACEQGVLVGDHAGGIDGGWSCWSSWGPCAQGKKTRSRKCNNPPPSGGGKSCIGETSESRQCEDEDLEHLRLLEPHCFPLSLVPTEFCPSPPALKDGFVQNEETTFPVGKNIVYSCNEGYSLVGDPVARCGEDLQWTVGKMHCQKIACVLPTLMRGLQSHPQKPFYTVGEKVTFSCSSGMSLEGPSTFLCGSSLKWSPEMKNVQCVRKEAPLAKKVPECQLWEKLQNSKCVCKMPYECGSSLDVCARDERSKRILRLTVCKMHVLQCQGRNYTLSVGETCTLPGSAEKACGACPLWEKCDAQSSKCVCRAASECEEAGFRVCVEVNGREQTMTECEAGVLRCLGLSITVTSIRPCAPEAP

SEQ ID NO: 298 - protein, 547 aa, Sus scrofa
MRVRRRFTFAVCILEISILSAGPTPSYHPKPVDCNGTPSPIDCRMSPWGEWSRCDPCLKQMFRSRSIETFGQFNGQKCVDAVGDRRQCVPTEPCEDLEEDCGSDFQCGTGRCIKRRLLCNGDNDCGDFSDEDDCDSDPRPPCRERVVEESELARTAGYGINILGMDPLTTPFDNEYYNGLCDRVRDGNTLTYYRKPWNVAALIYETKVDKNFRTEYHERQIQVLKTIIEEKKSNFNADLTIKFTPTEAIEQLKSKNVELANEENSNPMNNKAHFRFTYSKTETYKLLLSYSSKKEKIFLHVKGVIHLGRFVMRKRDVMLTKTFLDDVKYLPSTYEKGEYFAFLETYGTHYSSSGSLGGLYELIYVLDKATMTEKGIELRDVHRCLGFNLDLSLNFGVEIKGKIDSENCLKRGDGKTENIMNDDFIDDVISFIRGGTRKYATELKEKLLKGAKMINVTDFVNWASSLNDAPVLINQKLSPIYDLIPVKLNDAHLKRQNLERAIEDYINEFNVRKCQLCQNGGTVILLDGQCLCSCPNKFQGIACEIPK

SEQ ID NO: 299 - protein, 725 aa, Sus scrofa
MGLWWVTVQSPARRMGWLPLLLLLTQCSGAPGQRSPLNDFQVLPGTELQHLLHAVGPGSWQEDVADAEECAGRCGPLMDCRAFHYNVSSHGCQLLPWTQHSPHTRLQHSGSFDLFQKKNYVRTCIMDNGVEYRGTVAITMGGLPCQRWNLRFPNDHKYTPTLRNGLEENFCRNPDRDPGGPWCYTMDPAVRFQSCGIKSCQEAVCFWCNGEDYRGSVDRTESGRECQRWDLQHPHPHPFEPLKFLDKNLDDNYCRNPDGSERPWCYTTDPQVEREFCDLPRCGSGAQPRQEATTLNCFRGKGEGYRGMVNTTAAGVPCQRWDAQHPHQHRFAPEKYACKDLRENFCRNPDGSEAPWCFTSRPGMRVAFCYQIRRCNDDVRPEDCYHGWGEQYRGSVSKTRKGVRCQSWSARTPHKPQFTPTSDPEAQLEENFCRNPDGDSHGPWCYTTDPGIPFDYCALRRCDDDQPPSILEPPDPVLFEKCGKRVTRVDPRRSKLRVVGGQPGNSPWTVSLRNRQGQHFCGGSLVKEQWVLTARQCFSSCHVPLMGYEVWLGTLFQNPQPGEPGLQRIPVAKMICGPSDSQLVLLKLERPATLNQRVALICLPPERYVVPPGTKCEIAGWGETKGTGDDTVLNMASLNVISNQECNVKHRGRVRESEMCTEGLLAPVGACEGDYGGPLACFTHDCWVLEGIIIPNRVCARPRWPAIFMRVSVFVDWINKVMRLG

SEQ ID NO: 300 - protein, 190 aa, Sus scrofa
MVPTLLLLPALAGLLGVAEGQAFHLGKCPNPPVQENFDVNKYLGRWYEIEKIPVSFEKGSCIQANYSLKENGNIKVINKELRADGTVNQIEGEATPDNITEPAKLGVKFFWLMPSAPYWVLATDYENYALVYSCTTIIWLFHLDHVWILGRNPYLPPETVTYLKDILTSNDIDIEKMTITDQVNCPEYLQ

SEQ ID NO: 301 - protein, 202 aa, Sus scrofa
MELWGPYLLLCLFSLLTQVTAETPTPKVKKPANAKKDAASPKILEELKTQLDTLAQEVALLKEQQALQTVCLKGTKVHMKCFLAFVQAKTFHEASEDCISRGGTLGTPKTGSENDALYEYLRQSVGAEAEVWLGFNDMADEGAWVDMTGGHIAYKNWETEITAQPDGGKVENCAALAGAANGKWFDKRCRDKLPYVCQFAIV

SEQ ID NO: 302 - protein, 2462 aa, Sus scrofa
LLGGVGPGLLLLAVLSLGTTVPSTGASKSKRQAQQIVQPQSPLVDSQRKPGCYDNGKHYQINQQWERTYLGSALVCTCYGGSRGFNCESKPEPEETCFDKYTGNTYRVGDTYERPKDSMIWDCTCIGAGRGRISCTIANRCHEGGQSYKIGDTWRRPHETGGYMLECVCLGNGKGEWTCKPIAEKCFDHAAGGTSYVVGETWEKPYQGWMMVDCTCLGEGSGRITCTSRNRCNDQDTRTSYRIGDTWSKKDNRGNLLQCICTGNGRGEWKCERHTSLQTTSAGSGSFTDVRTAIYQPQPHPQPAPYGHCVTDSGVVYSVGMQWLKTQGNKQMLCTCLGNGVSCQETAVTQTYGGNSNGEPCVLPFTYNGRTFYSCTTEGRQDGHLWCSTTSNYEQDQKYSFCTDHTVLVQTRGGNSNGALCHFPFLYNNRNYTDCTSEGRRDNMKWCGTTQNYDADQKFGFCPMAAHEEICTTNEGVMYRIGDQWDKQHDMGHMMRCTCVGNGRGEWTCVAYSQLRDQCIVDDITYNVNDTFHKRHEEGHMLNCTCFGQGRGRWKCDPVDQCQDSETRTFYQIGDSWEKYVHGVRYQCYCYGRGIGEWHCQPLQTYPGTTGPVQVIITETPSQPNSHPIQWNAPEPSHISKYILRWKPKNSPNRWKEATIPGHLNSYTIKGLRPGVVYEGQLISVQHYGHREVTRFDFTTTSTSSAVTSNTVVGETTPFSPVVATSESVTEITASSFVVSWVSASDTVSGFRVEYELSEEGDEPQYLDLPSTATSVNIPDLLPGRKYIVNVYQISEEGEQSLILSTSQTTAPDAPPDPTVDQVDDTSIVVRWSRPQAPITGYRIVYSPSVEGSSTELNLPETANSVTLSDLQPGVQYNITIYAVEENQESTPVFIQQETTGVPRPDKVPPPKDLQFVEVTDVKVTIMWTPPESPVTGYRVDVIPVNLPGEHGQRLPISRNTFAEVTGLSPGVTYHFKVFAVNQGRESKPLTAQQTTKLDAPTNLQFINETDSTVMVTWTPPRARIAGYRLTVGLTRGGQPKQYNVGPSASQYLLRNLQPGSEYAVTLVAVKGNQQSPRATGVFTTLQPVGSIPPYNTEVTETTIVITWTPAPRIGFKLGVRPSQGGEAPREVTSDSGSIVVSGLTPGVEYVYTISVLRDGQERDTPIVKKVVTPLSPPTNLHLEANPDTGVLTVSWERSTTPDITGYRITTTPTNGQQGYSLEEVVHADQSSCTFENLSPGLEYNVSVYTVKNDKESVPISDTIIPEVPQLTDLSFVDITDSSIGLRWTPINSSTIIGYRITVVAAGEGIPIFEDFADSSVGYYTVTGLEPGIDYDISVITLINGGESAPTTLTQQTAVPPPTDLRFTNVGPDTIRVTWAPPPSIELTNFLVRYSPVKNEEDVAELSISPSDNAVVLTNLLPGTEYLVSVSSVYEQHESIPLRGRQKTGLDSPTGIDFSDITANSFTVYWIAPRATITGYKIRHHPEHMGGRPREDRVEYVVSIVAVNGREESPPLVGQQSTVSDVPRDLQVIATTPTSLLISWDAPAVTVRYYRITYGETGGNSPVQEFTVPGSKSTATISGLKPGVDYTITVYAVTGRGDSPASSKPVSIDYRTEIDKPSQMQVTDVQDNSISVRWLPSSSHVTGYRVTTTPKNGSGPSKTKTVGPDQTEMTIEGLQPTVEYVVSVYAQNQNGESQPLVQTAVTNIDRPKGLAFTDVDVDSIKIAWESPQGQVSRYRVTYSSPEDGIHELFPAPDGEEDTAELQGLRPGSEYTVSVVALHDDMESQPLIGTQSTAIPAPTNLKFTQVTPTSLTAQWTAPNVQLTGYRVRVTPKEKTGPMKEINLAPDSSSVVVSGLMVATKYEVSIYALKDTLTSRPAQGVVTTLENVSPPRRARVTDATETTITISWRTKTETITGFQVDAVPANGQTPIQRTIKPDVRSYTITGLQPGTDYKIYLYTLNDNARSSPVVIDASTAIDAPSNLRFLATTPNSLLVSWQPPRAKITGYIIKYEKPGSPPREVVPRPRPGVTEATITGLEPATEYTIQVIALKNNQKSEPLIGRKRTDELPQLVTLPHPNLHGPEILDVPSTVQKTPFVTKPGYDTGNGIQLPGTSGQQPSLGQQMIFEEHGFRRTTPPTTATPVRHRPGPYTPNVNEEIQVGHVPRGDVDHHLYPHVLGLNPNASTGQEALSQTTISWTPFQESSEYIISCHPVGIDEEPLQFRVPGTSASATLTGLTRGATYNIIVEALKDQKRHKIREEVVTVGNSVDQGLSQPTDDSCFDPYTVSHYAIGEEWERLSESGFKLSCQCLGFGSGHFRCDSSKWCHDNGVNYKIGEKWDRQGENGQMMSCTCLGNGKGEFKCDPHEATCYDDGKTYHVGEQWQKEYLGAICSCTCFGGQRGWRCDNCRRPGAELGPEGSTGHSYNQYSQRYHQRTNTNVNCPIECFMPLDVQADIEDSRE

SEQ ID NO: 303 - protein, 1170 aa, Sus scrofa
MGLAWGLSVLFLLHVCGSNRIPESGGDNSVFDIFELTGAARKGSGRRLVKGPDPSSPAFRIEDANLIPPVPDDKFQDLVDAVRAEKGFLLLASLRQMKKTRGTLLAVERKDHSGQVFSVVSNGKAGTLDLSLTVQGKQQVVSVEEALLATGQWKSITLFVQEDRAQLYIDCEKMENAELDVPIQSIFTRDLASIANLRIAKGGVNDNFQGVLQNVRFVFGTTPEDILRNKGCSSSTNVLLTLDNNVVNGSSPAIRTNYIGHKTKDLQAICGISCDELSSMVLELRGLRTIVTTLQDSIRKVTEENKELASELRRPPLCYHNGVQYRNNEEWTVDSCTECRCQNSVTICKKVSCPIMPCSNATVPDGECCPRCWPSDSADDGWSPWSEWTSCSVTCGNGIQQRGRSCDSLNNRCEGSSVQTRTCHIQECDKRFKQDGGWSHWSPWSSCSVTCGDGVITRIRLCNSPSPQMNGKPCEGEARETKACQRDACPINGGWGPWSPWDICSVTCGGGVQRRSRLCNNPAPQFGGKDCVGDETENQICNKQDCPIDGCLSNPCFAGAKCTSYPDGSWKCGACPPGYSGNGIQCEDVDECKEVPDACFNHNGEHRCKNTDPGYNCLPCPPRFTGSQPFGRSVEYATANKQVCKPRNPCTDGTHDCNKNAKCNYLGHYSDPMYRCECKPGYAGNGIICGEDTDLDGWPNEDLVCVANATYHCKKDNCPNLPNSGQEDYDKDGIGDACDDDDDNDKIPDDRDNCPFHYNPAQYDYDRDDVGDRCDNCPYNHNPDQADTDNNGEGDACAADIDGDGILNERDNCQYVYNVDQRDTDMDGVGDQCDNCPLEHNPDQLDSDSDRIGDTCDNNQDIDEDGHQNNLDNCPYVPNANQADHDKDGKGDACDHDDDNDGIPDDRDNCRLVPNPDQKDSDGDGRGDACKDDFDHDNVPDIDDICPENVDISETDFRRFQMIPLDPKGTSQNDPNWVVRHQGKELVQTVNCDPGLAVGYDEFNAVDFSGTFFINTERDDDYAGFVFGYQSSSRFYVVMWKQVTQSYWDTNPTRAQGYSGLSVKVVNSTTGPGEHLRNALWHTGNTPGQVRTLWHDPRHIGWKDFTAYRWRLSHRPKTGFIRVVMYEGKKIMADSGPIYDKTYAGGRLGLFVFSQEMVFFSDLKYECRDS

SEQ ID NO: 304 - protein, 110 aa, Sus scrofa
MAHQFPALTPEQRKELSEIAQRIVANGKGILAADESVGTMGNRLQRIKVENTEENRRQFREILFTVDNSINQSIGGVILFHETLYQKDSQGKLFRDILKEKGIVLGIKVN

SEQ ID NO: 305 - protein, 257 aa, Sus scrofa
QLDQGGAPLAGTNKETTIQGLDGLSERCAQYKKDGVDFGKWRAVLRIDKQCPSHLAIQENANALARYASICQQNGLVPIVEPEVIPDGDHDMEHCQYVTEKVLAAVYKALNDHHVYLEGTLLKPNMVTAGHACTKKYTPEQVAMATVTALYRTVPAAVPGICFLSGGMSEEDATLNLNAINLCPLPKPWKLSFSYGRALQASALAAWGGKAANKKATQEAFMKRALANCQAAKGQYVHTGSSGAASTQSLFTACYTY

SEQ ID NO: 306 - protein, 99 aa, Sus scrofa
AIVLTQTPLSLSVSPGEPASISCRSSQSLEKYGSNLLSWYQQKPGQSPQLLIYEATNRASGVPDRFSGSGSGTDFTLKISRVEAEDAGVYYCQQNKESP

SEQ ID NO: 307 - protein, 119 aa, Sus scrofa
MRAPMQLLGLLLLWLPGASCAIQLTQSPASLAASLGDTVSITCRASQSINKWLVWYQQQPGKAPKLLIYSASTLQSGVPCGFKGSGSGTDFTLTISGLQAEDVATYYCQQHHSAPPTVL

SEQ ID NO: 308 - protein, 215 aa, Sus scrofa
PRLHSPCQSALESRPPSPAGPVRALRIWKQFLSWYQQKPGQSPQLLIYGATNRASGVPDRFSGSGSGTDFTLKISRVEAEDAGVYYCQQNKESLNGFGAGTKLELKRADAKPSVFIFPPSKEQLETQTVSVVCLLNSFFPREVNVKWKVDGVVQSSGILDSVTEQDSKDSTYSLSSTLSLPTSQYLSHNLYSCEVTHKTLASPLVKSFSRNECEA

SEQ ID NO: 309 - protein, 463 aa, Sus scrofa
MGPRLGSLLSALLLLLYVAGTAHCDTPANCTYPDLLGTWIFHVGPGGSQRDVNCSVMGPPEKKVVVHLKKLDTAYDDFGNSGRFTIIYNQGFEIVLNDYKWFAFFKYKEEGRKVTSYCNETMTGWVHDVLGRNWACFTGEKAGNTFEKVNVNTAHLKSRQKKYSNRLYKYNHDFVKAINGIQKSWTATAYMEYETLTLKEMTQRGGGYNQRLPRPKPAPITAEIQEKSLHLPASWDWRNVRGTNFVTPVRNQASCGSCYSFASMGMMEARIRILTNNTQTPILSPQEVVSCSQYAQGCAGGFPYLIAGKYAQDFGLVEEACFPYTGTDSPCTVKEGCFRYYSSEYHYVGGFYGGCNEALMKLELVHHGPMAVAFEVYDDFLHYRKGIYHHTGLRDPFNPFELTNHAVLLVGYGTDLASGMDYWIVKNSWGTSWGEDGYFRIRRGTDECAIESIAVAATPIPKL

SEQ ID NO: 310 - protein, 246 aa, Sus scrofa
MKTLRGSVPALLPLLLLNLLHVSQAQVFCMPGIPGIPGIPGPDGIPGTPGIKGEKGLPGQVRDHNEVGEKGDPGIPGIPGKVGPKGPIGPKGTPGPPGARGPKGESGDYKATQKIAFSAKRTINTHLRPDQAIRFDQVITNANENYESRSGKFTCKVPGLYYFTYHASSRGNLCVNLMRGREQVRKVVTFCDQVQNTFQVTTGSIVLKLEVEETVFLQATEKSSLLGIDGANTIFSGFLLFPDAEA

SEQ ID NO: 311 - protein, 245 aa, Sus scrofa
MDMGSSSWPLLVLNLLLLLLALPLEGQDNLRCHGIPGIPGLPGAPGKDGHDGLPGPKGEPGIPAIPGTRGPKGEKGDPGKPGLPGKNGPMGTPGIPGTPGVMGPRGEPGEEGRYKQKHQSVFSVTRQTAQYPAANSLVKFNNVITNPQGDYDINTGKFTCKVPGLYYFVYYTSHTANLCMLLYRNGFKVITFCDHMSNSKQVSSGGVLLRLQEGEQVWLGVNDYNGLVGMEGSDSIFSGFLLFPN

SEQ ID NO: 312 - protein, 247 aa, Sus scrofa
MEAPRGWLVIMISVLAVSLASSAAQDTCRDLDGRDGAAGKPGRPGRPGPKGERGEPGAPAFQTGIRGLKGDQGESGSPGKPGRMGYPGPSGPPGLPGLPGLKGIKGNPGNIKDQRRPAFSAVRQNPPTSGNVVIFDEVITNQEGAYKSQLGQFICDVPGYYYFTFQVVSKWDLCLYIMSSRRDQVQQSLGFCDFNSKGLFQVVSGGTVLQLQRGDKVWIQRDPNKGRIYQGSEADSVFSGFLIFPST

SEQ ID NO: 313 - protein, 463 aa, Sus scrofa
MFSSGIGTVAARKRRECLLSLLIIGLWGCVTCHWSPVEDICTAKPRDIPVNPMCIYRSPEKKATEGEGSEQKIPEATNRRVWELSKANSHFATIFYQHLADSKNDNDNIFLSPLSISTAFAMTKLGACDNTLKQLMEVFKFDTISEKTSDQVHFFFAKLNCRLYRKANKSSELVSANRLFGDKSLTFNETYQEISEVVYGAKLQPLDFKENAEQSRGIINQWVSNKTEGRITDVIPPEAINELTVLVLVNTIYFKGRWKSKFSSENTRKELFYKANGESCSVSMMYQESKFRYRRVAEGTQVLELPFKGDDITMVLILPKLEKSLAKVEQELTPEVLQEWLDELADTLLVVHMPRFRIEDSFSVKERLQDMGLEDLFIPEKAKLPGIVAEGRDDLYVSDAFHKAFLEVNEEGSEAAASTTIGIAGRSLNPARVTFKANRPFLVLIREVALNTIIFMGRVANPC

SEQ ID NO: 314 - protein, 413 aa, Sus scrofa
MQALVLLLWTGALLGSGSCQNAGPEEGSPAPDTVGAPVEEEDPFFKVPVNKLAAAVSNFGYDLYRVRSSESPTANVLLSPLSVATALSALSLGAEQRTESSLHRALYYDLISNPDLHGTYKELLAAVTAPQKNLKSASRIIFEKKLRIKASFVAPLEKSYGTRPRILTGNSRLDLQEVNNWVQAQTKGKVARSTRELPGEISILLLGVAYFKGQWVTKFDSRKTSLEDFHLDEERTVKVPMMSDPKAVLRYGLDSDLNCKIAQLPLTGSMSIIFFLPLKVTQNLTMIEESLTSEFIHDIDRELKTVQAVLTVPKLKLSYEGELTKSVQELKLQSLFDSPDFSKITGKPIKLTQVEHRIGFEWNEDGGSATSSPGPRLTFPLDYHLNQPFIFVLRDTDTGALLFIGKILDPRST

SEQ ID NO: 315 - protein, 531 aa, Sus scrofa
MSRQLNIKSGGDKGGFSGHSAAVLRKALGSAASYRAAGKGAGAGFGSRSLHTLGRNQCVCFNAASSGVWTGGHSFGLGSGYAGGRASGFAGSMFGSMALGPMYPSMCPPGGIHQVTVNKSLLAPLNVELDPEIQKVRTQEREQIKALNNKFASFIDKVRFLEQQNQVLETKWQLLQQLDLDNCKKNLEPILEGYISTLQKQLEALSGDRMRLDSELKIMQDLVEDYKKRYEVEINRRTAAENEFVVLKKDADAAYTVKVELQAKVDSLDKDIKFLKCLYDAEIAQVQTHASETSVILSMDNNRDLDLDSIIAEVRAQYEDIALKSKAEAEALYQSKIQELQLAAGQHGDDLKHTRNEISELNRLIQRIRCEIANVKKQCSNLETAIADAEQRGENALKDARAKLDELEGALHQAKEELARMLREYQELMSLKLALDMEIATYRKLLEGEECRMSGENPSSVSISVISSSASGYGYHPGSLASSDPGASTVASSSGSTRSGQTRAKVTQAGDPKDPQSKSAPVSGPARKATR

SEQ ID NO: 316 - protein, 328 aa, Sus scrofa
MNAFREIKPVELPNCKLVKGIESGSEDLEVLHNGLAFISTGLKYPGIKVFEPDKPGKILLMDLNEEDPTVLELRITGSNFDLSSFNPHGISTFTDEDNTVYLLVVSHPDLKSTVELFKFQEEEKTLLHLKTIKHKLLPKINDIVAVGPEHFYATNDHYFVDTYLTFWEMYLGLAWSYAVYYSPNEVQVMASGFDFANGINISPDGKYVYIAESMAHKIHVYEKHANWTLTPLKSLDFDTIVDNISVDPVTGDLWIGCHPNGMKVFFYDPENPPGSEVLRIQNILTEEPKVTVVYADNGTVLQASTTASVYKGKLLIGTVFHRALYCEL

SEQ ID NO: 317 - protein, 351 aa, Sus scrofa
MDIQSLHQICCEGNSVACVLGRRWLMNYICSKQAVLSSKFAPCCELPEPFRGECIITSENDDTPDLSPLPLSRFTEDPFICKQTPAKQDDSLQEFLYEYSRRHPELAVPVILRVDTVYQNLLGKCCKLENPLECYSHGEEIFQRVVHDSHERVKNLCDLREKLGDRSFHDRLIVLYTKKAPQLSTQELVVFTKNMAAAASKCCPLNDELQLACMEDSAKLMLGALCRRHETEPINAGVGHCCDDSYAFRKPCFDDLQVDGTYISPPLSCDKVINLKEDLCKAQEQEFQTEKQRFLSHLVKQKPHAAEMKFQSIIVDFAHLVERCCQAEKSEMCFQKEGSKLIEKCQSLLGS

SEQ ID NO: 318 - protein, 411 aa, Sus scrofa
MGRGHYEFHSLDIHSCELLGSTLTPLPGQGLYLAISDSSIRVKGKWKVRKGILKLDGSFDVKVKGITISVNLLLGSESSGRPTVAVSSCSSHIDDVETHMSGDLSWLLNLFHNQIESRFRRTLESKICEEIQDLVASDLQPYLQTVPVTTEIDNLAGIDYSLVEAPRATAQMLDVMIKGEIFSLDHRSPVGFLAPVMRLPEEHSRMVYFAVSDYVFKTASLVYNEAGFLNFSITDDLVPPTSNIRLTTNSFRTFVPRLARLYPNMNLELRGAMVSAPFLNFGSGNLSSTPQIEVEGFVLLPNSVREPVFRLGMATNVSAALTFNTSKITGFLKPGKIQMELKESKVGIFNVELLEALLNYYLLNNLYPKVNDKLAEGFPLPLLNYIQLHDPVLQIHKDFLLLGTNIRYLRV

SEQ ID NO: 319 - protein, 370 aa, Sus scrofa
MEWKILPIFLFLPLSVILIQQVSSQDLSSCAGRCGEGYSRDAICNCDYNCQHYMECCPDFKKVCTMELSCRGRCFESFARGRECDCDSDCKKYGKCCSDYDNFCEEDETNLCNGRPVDGLTTLHNGTLVAFRGHYFWMLNPFTPPSPPRRITEVWGIPSPIDTVFTRCNCERKTFFFKDSQYWRFTNDIKDAGYPKLISKGFGGLNGKIVAALSIAKYKNRPESVYFFKRGGSIQQYTYKQEPITKCTGRRPAVHYSVYGETTQVRRRRFERAIGPSKTHTIRIQYSPIRLTYQDKGFLHNEVKVSTLWRGLPNVVTSAISLPNIRRPDGYDYYAFSRDQYYNIDVPQRTARAITTRSGQTLSNVWYNCP

SEQ ID NO: 320 - protein, 458 aa, Sus scrofa
MAPLRPLLMLALLAWVALADQESCKGRCTDGFIAERKCQCDELCSYYQSCCADYVAECKPQVTRGDVFLQPDDEYRAYDYHEETRHNTSVQEEPRIPVLLAKTEETPVLKPEEEAPPPGPQTDDLGPEEELCSGKPFDAFTNLKNGSVFAFRGLYCYELDEKAVRPGYPKLIQDVWGIKGPIDAAFTRINCQGKTYLFKGSQYWRFDDGVLDPNYPREISEGFKGIPDDVDAALALPAHSYSGRERVYFFKGKQYWEYVFQQQPSREECEGSSPSDVFAHFALMQRDSWEDIFRLLFWSHSFGGAIEPRIISQDWLGLPEQVDAAMAGQIYISGSALKPSQPKMTKSARRSGKRYRSRRGRGRGRGHSRSQKSHRQSRSTWLPWFSSEETGPGGYNYDDYKMDWLVPATCEPIQSVYFFSGEEYYRVNLRTQRVDTVTPPYPRSIAQYWLGCPVPDQK

SEQ ID NO: 321 - protein, 454 aa, Sus scrofa
KVHVDARGHRPYDKRREEAPSLRPVAPPISAGGYQPRPAKVAIGQKKVERKPPDAGGCLHADPDLGVLCPTGCQLQDTLLKQERPIKTSIEELNSNIDSVSQSSSSTFQYMTLLKRLWKDRQKQRRDNENVINEFSSELEKHQLYIDETVNSNIPTNLRVLRAILENLRSKIQKLESDVLAQMEYCRTPCTVTCNIPVVSGKECEEIIRNGGETSEMYLIQPSDSIEPYRVYCDMKTERGGWTVIQNRQDGSVDFGRKWDPYKQGFGNIATSADGKKYCGIPGEYWLGNDKISQLTRMGPTKLLIEMEDWEGGKVKAIYEGFTVQNEANKYQISLSKYKGTAGNALLEGASQLVGENRTMTIHNSMFFSTYDRDNDGWKTTDPRKQCSKEDGGGWWYNRCHAANPNGRYYWGGSYSWDMAKHGTDDGVVWMNWKGSWYSMKKMSMKIRPFFPEQ

SEQ ID NO: 322 - protein, 1119 aa, Sus scrofa
MARGAEGALLLLLICFNFGNGLHLEALHSRNENKLLPKHTHLVRQKRAWITAPVSLREGEDLSRKNPIAKIHSDLAEEKGIKITYKYTGKGITEPPFGLFVFNKDTGELNITSILDREETPFFLLIGYAVDEKGNNLEKPIELRIKVLDINDNEPVFTQDVFVGSIEELSAANTLVMKITATDADEPNTLNSKISYRIVSQEPAYPPVFYLNKDTGEIYTTSITLDREEYSSYTLTVEARDGNGQITDKPVKQAQVQIRILDVNDNIPVIENKVYEGTVEENQANVEVLRIKVFDADEVGSDNWLANFTFASGNERGYFHIETDTQTNEGIVTLVKEVDYEEMKSLNFSVIVTNKAAFHKSVKNKYKPTSIPIRVKVKNVKEGIYFKSSTVRFHASESMEKSSQSQILGKFQAFDEDTGQVARVKYAKLEDIDNWIYVDSATSEIKLVKIPDYESRYVQNGTYTVKIVAVTEEYPRKTITGTIVIMVEDVNDNCPTLVEPVQMICDDAKYVNVTAVDLDGPQNSAPFSFSIIDKPAGMAERWKIVHQESTSVLLQQNEQKAGRNQIRFSISDSQGFSCPEKQILDLTVCKCVEGRSCAERRSWSDSYVGLGPAAIALIILALLLLLLVPLLLLTCHCGEGAKGFTPIPGTIEMLHPWNNEGAPPEDKVVVPLLGADHRDGVAAGGGVAGMMSKEATVKGSSSASFTKGQHELSEMDSRWEEHRSLLSGGATQVTGTTGAVVSTETMRTTRATGASREMAGAQAAAVAVNEEFLRTYFTEKVASYTEEDDIHIAKDCLLVYSQEETESLQGSIGCCSFIEGELDDRFLDDLGLKFKTLAEVCLGQKIEMDAEMEQRPKAVRETSGQAPSGSLYEQTRVNSENAYSSGSSFQVPKPLPEVNTEKLTQEIITEKSVSSRQGQTIAAPLSDPLASGNMIVTETSYATGSTLPPSTVILGPNQSQGLIVTERVYAPASSLLDQQYASEGHVVVTERVIQPDGGTSGPLEGPGHLPDAHYVMVRERERFLTPSSSLQPPMAVPSVAIGQNMTVTERVLSPASTLQSSYQIPTETSVTTKKTVVSGTRVPGPLPNLGFEEPGHSNHTITASSTKVTKHSTIQHAYS

SEQ ID NO: 323 - protein, 651 aa, Sus scrofa
MRSEHLAFIIILIISGQLYAEEKPCGFPTVENGRIAQYYYTFESYYFPMGLNQNLLFSCLAGYTTETGKQEARTTCTAAGWSPDPRCFKKCPKPDLRNGYILDTKLFYKIQENMHYGCSSGYKTTAGQDEEVVQCLAGGWSSQPTCRKEHETCLAPELHHGSYSTTQKTFKVKDKVRYECAPGYHTASGKRTEEVECHPYGWALTPRCAKLKCSSLRLIENGYFHPVKQTYEEGDVVQFFCHKNYHLSGADLIQCYNFGWYPESPVCEGRRNRCPPPPLPLNSRVQTYSIAYRHGETVRIECGLNFGIRGSEEIRCENGKWTEPPQCVEENERTACKEPPFVENGTANPRSKLYYSGDKVTYTCESGYHLRGPGEIICTRGKWTLPPACVENTENCNPPPDIINGAVIGGLLANYTAGSSVEYRCNEYYLLKGAKISHCEQGKWSTPPVCLEPCSVDVDHLSRNNLEMKWNYEGKILHGDLIDFVCKQGYDLSPSSPLSELSVQCNRGEVKYPLCIRKESRRMCATPPLIKNGVTVSPAAGAYENGSSVEYRCFDHHFLQGSRKSHCLEGVWTPPPLCLEPCTLSYVKMEHNNLLLKWTFDNRPYILHGEYIEFLCKGDTYIAELPVIGSELRVQCDRGQLKYPRCVQRER

SEQ ID NO: 324 - protein, 99 aa, Sus scrofa
AIVLTQTPLSLSVSPGEPASISCRSSQSLEEYGSNLLSWYQQKPGQSPQLLIYEATNRASGVPDRFSGSGSGTDFTLKISRVEAEDAGVYYCQQFKEFP

SEQ ID NO: 325 - protein, 137 aa, Sus scrofa
DTGSCGAIVLTQTPLSLSVSPGEPASISCRSSQSLEEYGKNWLSWYQQKPGQSPRLLIYQATNRASWVPERFSGSGSGTDFTLKISRVEAEDAGVYYCQQYKEFPPTVIQPLTQTPLLGAQLHTWLCVVWGAEGQKL

SEQ ID NO: 326 - protein, 149 aa, Sus scrofa
METQRASLCLGRWSLWLLLLGLVVPSASAQALSYREAVLRAVDRLNEQSSEANLYRLLELDQPPKADEDPGTPKPVSFTVKETVCPRPTRQPPELCDFKENGRVKQCVGTVTLDQIKDPLDITCNEVQGVRGGGLCYCRRRFCVCVGRG

SEQ ID NO: 327 - protein, 451 aa, Sus scrofa
GQGQEKLSPLSLLELDNQEHGGHTALNEAPGECKGTPTPEQTRRLAQAMMAFTRDLFSLVARSSTRPNLVLSPLSVALALSHLALGTVAAPVQTSRAGSQGNSLPQSVLGGTSSISLHVAPTSLTLLSPSFALDGFPPPRAFCGPALPLQGSCRLGALPGAQGVRAARTNPADMKFYPWSQYKFTARQSRWVAVPPLCTVHRTQGGSERRHSGTPHPSPGLAVADEGMLAQPPPRTGRLLSSCCLLVAYFPFKNNMSFVVMVPIHFEWNVSQVLANLSWDILHQPLLRERPTKVQLPKLHLKYQLDLVATLSQLGLQGLFQAPDLRGISDESLVVSSVQHQSTLELSEAGVEAAAATSTAMSRMSLSFSVNRPFLFFILEDTTSLPLFVGSVRNPNPGAQPERKEQQDSPDSRYPFWNQKAFPRGDKPFYPDLKLAPPSEEEDYPQPSGPK

SEQ ID NO: 328 - protein, 509 aa, Sus scrofa
MKPLAGGLPCFLTFGLWLGLLLLCSWGCPGSAAPRSPPEKIAVIGAGIGGTSAAYYLRQKFGKDVKIDVFEKGEVGGRLATLTMQGQEYESGGSIIHPLNLHMKRFVKDLGLSAVQSPSGLVGVYNGETLVYEESSWFIINMIKLIWYYGFQSLRMHMWVEDILDKFMRIYRYQSHDYAFSSVEKLLHSLGGDDFLGLFNRSLLETLQKAGFSEKFLDEIITPVMRVNYGQTMNINGFVGAVSMSCTDPGLWAVKGGNKLVCSRLLQASKSNLISGSVMSIEEKTRTKQTGNPTKVYEVVYQTGPEIHSDFYDIVLVATPLNQKMSNITFLNFDPPIEEFHQYYEPLVTTLIKGQLNSTVFSSRALDEFDLGTILTTDNPDLFINSIGLVSSVEENNNPQPKVERAHVWKVFSAGPLTKEQILKLFVSYDYAVKQSWLAYPHYTPPEKCPSTILHDQLYYLNGIEFAASAMEMSAVAGYNAALLAYHRWNGHTHMIDQEDLYEKLKTEL

SEQ ID NO: 329 - protein, 1045 aa, Sus scrofa
MNWPFFRTAAVLFIFLVVLEVNSEFRIQVRDYNTKNGTIKWHSIRRQKREWIKFAAACREGEDNSKRNPIAKIHSDCAANQQVTYRISGVGIDQPPYGIFVINQKTGEINITSIVDREVTPFFIIYCRALNAQGQDLERPLELRVRVLDINDNPPVFSMSTFLGQIEENSNANTLVMRLNATDADEPNNLNSKIAFKIIRQEPSDSPMFIINRYTGEIRTMNNFLDREQYSQYSLAVRGSDRDGGADGMSAECECSIKILDVNDNIPYMELPSNSLQIEENSLNSNLLQIRVIDLDEEFSANWLAVIFFISGNEGGWFDIEMNERTNVGTLKIVKPLDYEEVKNLQLSLGVRNKAEFHQSIMSQYKLTATAISVTVLNVIEGSVFRPGSKTYVVTSSMGQNYKLGEFIATDLDTGLPSTTVRYVMGNNPTDLLAIDSKTGIITLRNKVTREQYNLLGKKYQGTILSIDDALQRTCTGTINIDLEGSGWEDRQTDGAVTGGGTITSTNDFTPSYEYTTTNTEDVYSVTPTGNGVRVRDPLDNVHFGPAGIGLLIMGFLVLGLVPFLLMYCDCGGAPGGGAGFEPVPECSDGAIHSWAVEGAQPERADLTTICVPQVPPDNANIIECIDNSGVYTNEYCGREMQELGGGERTTGFELIDGGKISGAPEICQEHSGTLRRNSMRECREGGLNMNFMESYFCQKAYAYADEDEGRPSNDCLLIYDIEGEGSPAGSVGCCSFIGEDLDDSFLDTLGPKFKKLADISLGKETEPYPDPDPSWPPQSTDPICPPQGTEPIGSGHPPISPHIGTTTVISESTYPSGPGVHHPMPIPDPLSYGNVTMTESYTTSGILKPSVHVHDNRQASNVVVTERVVGPISGANLHGMLEMPDLRDGSNVIVTERVIAPNSSLPTTLTIPDPRESSNVVVTERVIRPTSGIVGNLSMHPDISNTHNVIVTERVVSGSGITGISGGSGMGSSGLVGSTAGVGGDGLGLSSLGGGGLSSGIGGTATIGHLRGSSEHHFSNTLGSASPTTTRSRITKYSTVQYTK

SEQ ID NO: 330 - protein, 120 aa, Sus scrofa
MRFPAQLLGLLLLWVPGSSGAIVLTQTPLSLSVSPGEPASISCRSSQSLVDSDGDSLLHWYLQKPGQSPRLLFYFATNRASWVPERFSGSGSGTDFTLKISRVEAEDAGVYYCQQYKEFP

SEQ ID NO: 331 - protein, 927 aa, Sus scrofa
MDMFPLTWIFLALYFSGLQVTGQPDPPCGGRLNSKDAGYITSPGYPQDYPSHQNCEWIVYAPEPNQKIVLNFNPHFEIEKHDCKYDFIEIRDGDSESADLLGKHCGNIAPPTIISSGSVLYIKFTSDYARQGAGFSLRYEIFKTGSEDCSKNFTSPNGTIESPGFPEKYPHNLDCTFTILAKPKMEIILQFLTFDLEHDPLQVGEGDCKYDWLDIWDGIPHVGPLIGKYCGTKTPSELRSATGILSLTFHTDMAVAKDGFSARYYLVPQEPQDNFQCNVPLGMESGRIANEQISASSSYSDGRWTPQQSRLHGDDNGWTPNLDSSKEYLQVDLRFLTVLTAIATQGAISRETQNGYYVKSYKLEVSTNGEDWMVYRHGKNHKVFQANNDASEVVLNKLHAPLLTRFVRVRPQTWHAGIALRLELFGCRVTDAPCSNMLGMLSGLIADSQISASSTREYLWSPSAARLVSSRSGWFPRIPQAQPGEEWLQVDLGAPKTVKGVIIQGARGGDSITAVEARAFVRKFKVAYSLNGKDWEHIQDPRTQQPKLFEGNMHYDTPDIRRFDPVPAQYVRVYPERWSPAGIGMRLEVLGCDWTDSKPTVETLGPTVKSEETTTPYPIDEEATECGENCSFEDDKDLQLPSGFNCNFDFPEEPCGWVYDHAKWLRSTWTSSSSPSDRTFPDDRNFLRLQSDGRREGQYARLISPPVHLPRSPVCMEFQYQATGGRGVALQVVREASQESKLLWVIREDQGSEWKHGRIILPSYDMEYQIVFEGVIGKGRSGEIAIDDIRISTDVPLENCMEPISAFAVDFPELHGREGYEDEIDDEYEVVDWSNSSSPTSGSGAPLADKEKSWLYTLDPILITIIAMSSLGVLLGATCAGLLLYCTCSYSGLSSRSCTTLENYNFELYDGLKHKVKMNHQKCCSEA

SEQ ID NO: 332 - protein, 704 aa, Sus scrofa
MRLAFCVLLCAGSLGLCLAFPKETVRWCTVSSQEASKCSSFRHNMKKILPVEGPHVSCVKRTSYLECIRAILANEADAVTIDGGLVFEAGLAPYNLKPVVAEFYGSKDDPQTHYYAVAVVKKGSDFQLSQLRGKKSCHTGLGWSAGWNIPMGILLPPDSGEEAAAKFFSSSCVPCADRMAFPKMCQLCAGKGVEKCACSNHERYFGYSGAFKCLQEDVGDVAFVRHVTVFENLPDKADRDQYELLCKDNTRRPVDDYENCYLAQVPSHAVVARSVDGKEDLIWELLNQAQENFGKDKSAEFQLFSSSHGKDLLFTDACLGFLRVPPKMDAKLYLGYEYFAAIQHLRRVQGTEEPQRVMWCAVGQHERTKCDSWSVLSGGILNCNSEDTMEDCIAAIAKGEADAMSLDGGFLYTAGKCGLVPVLAENYLSQDGKERFGSKCVNTPVEGYYVVAVVKKSDADLTWNSLRGKKSCHTAVGTSAGWIIPMGFIYNQTGSCKLDEFFSQSCAPGSDPESRLCALCSGSISGQPAHTCAPNSHEGYHGFSGALRCLVEKGDVAFVKHPTVLQNTDGRNPEAWAKDLKQEDFQLLCPDGTRKPVTEAQSCHLAAVPSHAVVSRKDKADFVRRMLFNQQELFGRNGFEYMMFQLFKSSTEDLLFSDDTECLANLQDKITYQKYLGPEYLQAIANVRQCFPSELLDACTFHGN

SEQ ID NO: 333 - protein, 224 aa, Sus scrofa
  MOD_RES (1)..(11): Any amino acid
  MOD_RES (14)..(14): Any amino acid
XXXXXXXXXXXGAXPAGHEVAALQPPVVQLHEGNPYPRREPPQPTARAWRGDDIRASPPRLPVAQPYPGAPHHGAYVHPRPVHPTGSPAHTHHDFQPVLHLVALNSPQSGGLRGIRGADFQCFQQARAVGLAGTFRAFLSSRLQDLYSIVRRADRAAVPIVNLRDEVLFPSWEALFSGSEGQLKPGARIFSFDGRDVLQHPAWPPEERVARLRPQRAPADRELL

SEQ ID NO: 334 - protein, 559 aa, Sus scrofa
MGTTSRAALVLAYLAVASVVPEGVSKAPGQRELGAEHLLQEAGYAAPPSPPLSHTLPRDPPDTSQQSPHFEGQSEVQPSSSQEAIPFQQEELTPAQLPAEKKGDPPLLQETVPLQKEQSPPKLPTEQKENPSFLHQEEMTFQSKHREKKPSSFMEHRPPEPGSWNAAQHCQPGRPRGGWGHRLDGFPPGRPSLDNMDQICLPNRQHVVYGPWNLPQTGFSHLSRQGEALNLLETGYSRCCRCHNYIHRLDCAKLVWEDAMTRFCEAEFSVKTRPHGCCKRQGEARFSCFQEEAPRPHYQLRACPSHQPGISSGPELPFPPGPPTLDNIKNICHLRRFRSVPRNLPATDPIQRQLHALTQLEGEFQRCCQQGNNHTCTWKAWEDALDGYCNQEQATKTHRHLCCHHPPSPARDECFARQAPYPNYDRDILALDLSRVTPNLMSHLCGNRRVLTKHKQIPGLIQNMTVRCCDVPFPEQACCAEEEKAAFIDNLCGPRRKFWRDSAHCCKLSPGDEQVNCFNVNYLRNVAVVAGDTRDAKGQGEQGPTQGTNISPTLEPKEE

SEQ ID NO: 335 - protein, 582 aa, Sus scrofa
MSTQRSSSKQYSSSRSGGGGGGGGGVSSLRISSSKCSIGGGGLSSGGFSGGSFSRGSSGGGCFGGSSGGYGGGLGGFGGGSFGGGYGSSSFSSCGGGSFGGGYGGSSFGGGGFGGGSFGGGGGFGGGGFGGGSFGGGGGFGGGGFGGFGDGGLLNGNEKVTMQNLNDRLASYLDKVRALEDSNYELEVKIKEWYDKHGNVGRREPRDYSKYYKIIEDLKNQIINLTVDNANILIQVDNARLAADDFRMKYENEVTLRQSVEADINGLRRVLDELTLTKTDLEMQIESLNEELAYLKKNHEEEMRDLQNVSTGDVNVEMNAAPGVDLTELLNNMRSQYEQLAEQNRRDAEAWFNEKSKELTTEINTNIEQVSSYKSEITELRRTIQGLEIELQSQLALKQSLEASLAETEGRYCVQLAQIQSQITALEEQLQQIRAETECQNAEYQQLLDIKIRLENEIQTYRSLLEGEGSSGGFTHSGGRGGGSSGGGGGSYGGGSSGGGGGSYGGGSSGGGGGSYGGGSSGGGGGSYGGGSSGGGGGSYGGGSSGGGGGSSGGLKSSSSVSIGEQSSKGPRSAETSWGNQN

SEQ ID NO: 336 - protein, 147 aa, Sus scrofa
MALQRTHVLLLLLLLTLLGLGLVQPSYGQDRMYQRFLRQHVDPDATGGNDAYCNLMMQRRKMTSHYCKRFNTFIHEDIWNIRSICSTSNIQCKNGQMNCHEGVVKVTDCKETGSSRAPNCRYRAMASTRRVVIACEGNPEVPVHFDK

SEQ ID NO: 337 - protein, 470 aa, Sus scrofa
MLPAATASLLGPLLTAWALLPFAQGQTPNYTRPVFLCGGDVTGESGYLASEGFPNLYPPNKECIWTITVPESQTVSLSFRVFDLELHPSCRYDALEVFAGSGTSGQRLGRFCGTFRPAPLVAPGNQVTLRMTSDEGTGGRGFLLWYSGRATSGTEHQFCGGRLEKAQGTLTTPNWPESDYPPGISCSWHIIAPPDQVISLTFGKFDLEPDSYCRYDSVSVFNGAVSDDAKRLGKFCGDKAPGPISSEGNELLVQFVSDLSVTADGFSASYRTLPRGATEKAPAQSPGEDARPSPPLLGPGPKPGAGPKVKPELPPEEKPKAAPKAEATPAGSDGPSVPCPKQCRRTGTLQSNFCNSNLVVTATVKSMVRGPGEGLTVTVSLIGVYKTGGLDLPSPPTDTSLKFYAPCKQCPPMKKGTSYLMMGQVDENRGPILPPESFVVLYRPNQDQILTNLAKRRCPSQPVQAAESQA

SEQ ID NO: 338 - protein, 267 aa, Sus scrofa
MKRALALVGLAFLSVLRAGRPQQTADDACSVQILVPGLKGDAGEKGDKGAPGRPGRVGPTGEKGDVGDKGQKGGVGRHGKIGPIGSKGEKGDSGDIGPPGPSGEPGVPCECGQLRQAIGEMDNLVSQLTAELKFLKNAVAGVRETEQKVYLLVKEEKRYVDAQLACQGRGGTLGMPKDEAANGLLAAYIAQAGLARVFIGINDLEREGTFVYADRSPMQTFNKWRSGEPNNAYDEEDCVELVASGGWNDVACHLTMHFLCEFDKEHV

SEQ ID NO: 339 - protein, 560 aa, Sus scrofa
MAGPPTAHQPLMEMLRGAWLCGACLLLLARPTQPCPVGCDCFIHEVFCSEEELAAIPPDIPPHATDIIFVETSFTTVGARAFSGSPNLTKVVFLNTQVCHFGPDAFGGLPRLQDLEITGGAFSNLSSNIFSNLASLVKFTLNFNKLEALPEGLFGHMDALESLQLQGNQLQTLPRHLFQPLRHLKTLNLAQNLLAQLPEELFHPLGSLETLRLSNNVLASLPKGVFGKLSSLQELFLDGNSISELPPEVFAQLPHLEKLWLQRNAIRQLPPAIFSSLGNLTFLNLQGNALKMLPTGLFAHSPGLISLSLSHNQLEMVPEGAFANLSSLGSLTLSHNALTHLPTGVFRGLDGLVKLYLGYNNLTALHPALFQNLSKLELLSLSRNLLTTLPEGIFNTNYNLFNLALHGNPWQCDCHLAYLFNWLHQFSDRLFNIQTYCAGPAYLKGQVVPALVEEQLVCPVTRDHLGFQAPGPEDREPGDDWDLAAADRAARSRCTYSNPEGTVVLACDEAKCRWLNVQLSSRQASGSPGLMVNACQEWDLKSSCGSVRVTVSIEARAGEP

SEQ ID NO: 340 - protein, 100 aa, Sus scrofa
VSETSPKIFPLTLGSSEPAGYVVIACLVRDFFPSEPLTVTWSPSREGVIVRNFPPAQAGGLYTMSSQLTLPVEQCPADQILKCQVQHLSKSSQSVNVPCK

SEQ ID NO: 341 - protein, 286 aa, Sus scrofa
MHPTLSRRHLPIQGGKPKRLRTPLSFASIAWFLTLSITTQANSKRLVDSPTSHKPLSLTWLLTDSSTGITINSTQREAPLGTWWPELHVCLRLVIPDLNTMSTPPDILRAYGFYVCPGPPNNEKSCGNPRDFFCKQWSCVTSNDGYWKWPTSRQDRVSFSYVNTYTSSKQFNYLDWIKQKTTNCSPSDLDYLKISFTEKGKQENIQKWINGMSWGVVYYRGSWGGEGSILTIRLRIETQMEPPVAVGPNKVLAEQGPPIQEQRPSPNPSDFNTTSGSVPTEQLGLA

SEQ ID NO: 342 - protein, 678 aa, Sus scrofa
MGAGSSGQPWWPPLLLLLLLLGPAGARAQEDEDGDYEELVLGFRSEEDILADTAQHAATATFHRCAKDAWRLPGTYMVVLKEGTHRSQAERTARHLQAQAARRGYLTKILHVFHDLLPGLLVKMSSDLLELALKLPHVQYIEEDSFVFAQSIPWNLERILPARRQVDERHTPNGLVEVYLLDTSIQSGHREIEGRVTVTDFENVPEEDGTRFHRQANKCDSHGTHLAGVVSGRDAGVAKGASLRSLRVLNCQGKGTVSSTLTGLEFIWKRRLVVLLPLVGGYSRALNAACQNGAVLVAAAGNFRDDACLYSPASSPEVITVGATNAQDQPVTLGVLGTNFGRCVDLFAPGDDIIGASSDCSTCFTSQSGTSQAAAHVAGIVTMMLTAEPELTLAELRQRLIRFSAKDVINEAWFPEDQRGLTPNLVATLPPSSHGAGGQLFCRTVWSAHSGPTRTATAEAHCAAPEELLGCSSFSGSGRRRGERIEVRGSRRVCLAYNAFGGEGVYAVARCCLLPRANCSIHMAPPAGAGVQTRARCHQQSHVLTGCSSHWEVEDSGPRRRPVPRPQGQPDQCVGHEKASVHASCCHAPGLECKVREHGIPGPAEKVTVDCEEGWTLTSCGARPGASHTLGAYAMDNTCVVRGQDVRAGGRTSEETATAMAICCRRRPSGEEASQESQ

SEQ ID NO: 343 - protein, 323 aa, Sus scrofa
MDTRGVAAAMRPLVLLVAFLCTAAPALDTCPEVKVVGLEGSDKLSILRGCPGLPGAAGPKGEAGADGPKGGQGPPGAPGEPGPPGPKGDRGEKGEPGPKGESWEPEQCLTGPRTCKELLTRGHFLSGWHTIYLPDCQPLTVLCDMDTDGGGWTVFQRRSDGSVDFYRDWAAYKRGFGSQLGEFWLGNDHIHALTAQGTNELRVDLVDFEGNHQFAKYRSFQVADEAEKYMLVLGAFVEGNAGDSLTSHNNSLFTTKDQDNDQYASNCAVLYQGAWWYKSCHVSNLNGRYLGGSHGSFANGVNWSSGKGYNYSYKVSEMKFRAT

SEQ ID NO: 344 - protein, 442 aa, Sus scrofa
MGTELTQVLPTNPEESWQVYSSAQDSEGRCICTVVAPQQTMCSRDARTKQLRQLLEKVQNMSQSIEVLDRRTQRDLQYVEKMENQMKGLESKFKQVEESHKQHLARQFKAIKAKMDELRPLIPVLEEYKADAKLVLQFKEEAQNLTSVLNELQEEIGAHDYDELQNRVSNLEERLRACMQKLACGKLTGISDPVTVKTSGSRFGSWMTDPLAPEGDNRVWYMDGYHNNRFVREYKSMLDFMTTDNFTSHRLPHPWSGTGQVVYNGSIYFNKFQSHIVIRFDLKTESILKTRSLDYAGYNNMYHYAWGGHSDIDLMVDENGLWAVYATNQNAGNIVISKLDPVSLQVLQTWNTSYPKRSAGEAFIICGTLYVTNGYSGGTKVHYAYQTNASTYEYIDIPFQNKYSHISMLDYNPKDRALYAWNNGHQVLYNVTLFHVIRSDEL

SEQ ID NO: 345 - protein, 229 aa, Sus scrofa
MGGSGAGPRRNQFILLVLFLLQIQSLGLDIDSRPTAEVCATHTISPGPKGDKGEKGLPGMPGEKGKAGTVCDCGRYRKVVGQLDISVARLKTSMKFVKNVIAGIRETEEKFYYIVQEEKNYRESLTHCRIRGGMLAMPKDEAANTLLADYVSKSGFFRVFIGVNDLEREGQYVFTDNTPLQNYSNWQEGEPSDPYGHEDCVEMLSSGRWNDTECHLTMYFVCEFVKKKK

SEQ ID NO: 346 - protein, 400 aa, Sus scrofa
MEKARKPRLWGILCFDGDSYCAVTLASQVELEVPQLCSFILKTSHCSLKEVYGFNPEGKALLKKAKNSEEFAAAMSKYELRLAVPEGKQVLLYPEKEEPKHILNIKRGIISALLLPPETEETKQVLYLDTVYGNCSSDLTIKKGREHVATEISIERNLEKCDRFQPISTGVSPLALIRGMTRPLSTLIGSSQSCQYTLDPKRKHVSEAICKEQHLFLPFSYKNKYGMMAQVTQTLKLEETPKINSRFFNEGAEAVGLAFESTKSTSPPKQAEAIVKTLQELQKLHVSEQNAQRANLFHRLVTELRGLSSEAVATLLPKLMEVSSPITLQALVQCGQPQCYTHILRWLKNEKANPLLIDVVTYLVALIPEPSAERLREVFNTAKEQQSRATFYALSHVINK

SEQ ID NO: 347 - protein, 390 aa, Sus scrofa
MWRGLGLALALCLLSWGGTESQGKSSFCEQPPGWSIKDQDPMLNSYGSVTVVALLQASCYLCILQASRLEDLRVKLEKEGYSNISYIVVNHQGIASQLKYVYLKSKVSEHIPVYQQEENQTDVWTLLNGNKDDFLIYDRCGLLVYHLGLPYSFLTFPYVEEAIKTVYCENKCGNCSLKTLKDEDFCKNVYLATEEKTTEAPQPHHHHDHHHHRHHHHHHGHQHLGNGHLSEHPKPEAPDTPEQPPPSGLHHHHGHKGHQRQGHSENCDMPAGSESLQLSLPQKKLCRRGCISQLLCKFPKNSESALRSCCCHCRHLIFEKTESAVTCQCGENLPSLCSCQGLLAEENVIESCQCRLPPAACQASQQLNPAEASTKCSCKNKAGRCKCPSN

SEQ ID NO: 348 - protein, 471 aa, Sus scrofa
MGLPGSPRQWVLLLLGLLLPPAAPFWLLNVLFPPHTTPKAELSNHTRPVILVPGCLGNQLEAKLDKPDVVNWMCYRKTEDFFTIWLDLNMFLPLGVDCWIDNTRVVYNRTSGRVSNAPGVEIRVPGFGKTYSVEYLDNSKLAGVCTGGKGGALGCGGLAGTMARAPHATASPPGYMHTLVQNLVNNGYVRDETVRAAPYDWRLEPSQQEEYYLKLAGLVEEMHATYGKPVFLIGHSLGCLHLLYFLLRQPQAWKDRFIDGFISLGAPWGGSIKPMLVLASGDNQGIPIMSSIKLKEEQRMTTTSPWMFPSSHVWPEDHVFISTPSFNYTSHDFQRFFADLHFEEGWYMWLQSRDLLAGLPAPGVEVYCLYGVGLPTPRTYIFDHGFPYTDPVDVLYEDGDDTVATRSTELCARWQGRQQQPVHLLPLPGTQHLNMVFSNQTLEHINAILLGTYRNSTPVSPSTSTGTLPPE

SEQ ID NO: 349 - protein, 434 aa, Sus scrofa
MSILKIHAREIFDSRGNPTVEVDLHTAKGLFRAAVPSGASTGIYEALELRDNDKTRYMGKGVSKAVEHINKTIAPALVSKKLNVVEQEKIDKLMIEMDGTENKSKFGANAILGVSLAVCKAGAVEKGVPLYRHIADLAGNAEVILPVPAFNVINGGSHAGNKLAMQEFMILPVGAETFREAMRIGAEVYHNLKNVIKEKYGKDATNVGDEGGFAPNILENKEALELLKNAIGKAGYTDKVVIGMDVAASEFYRSGKYDLDFKSPDDPSRYISPDQLADLYKSFIRDYPVVSIEDPFDQDDWEAWQKFTGSAGIQVVGDDLTVTNPKRISKAVAEKSCNCLLLKVNQIGSVTESLQACKLAQSNGWGVMVSHRSGETEDTFIADLVVGLCTGQIKTGAPCRSERLAKYNQILRIEEELGSKAKFAGRNFRNPLAK

SEQ ID NO: 350 - protein, 1470 aa, Sus scrofa
MGSAGPLWVFLALIVPGVLGQCKFLPKYPFAKPKIQSDQSEFAVGTTWDYECLPGYTKRSFSITCLETSKWSDAQQLCKRKSCVSPRELLHGSVLAPMGIVFGSTITYSCNKGYRLIGDPSATCIISDNIVTWDKDMPICESIPCESPPAIPNGDFYGNDENFYYGMVVTYECHVGKNGKKLFDLVGEKSIYCTSKDNQVGIWSSPPPQCIPVVKCPMPDVENGIMESGFRRSFSLNDSVMFTCKPGFTMKGSNIVWCQLNGEWNPPLPRCSKGCLPPPHIHHGNYNKMDEEFFTVGQEVSYSCEPGYALIGTNSVQCTSLGTWSRSAPKCEVKSCDAIPNQLLNGRVVAPPNFQLGAEVSFVCDEGYRLNGSSSSQCVSEGMRVLWNNKFPVCERIFCDPPPAIKNGRNSYFSGPIPVNSVVRYSCSNSFRLIGERILFCISKDKVNGFWDKAAPVCEYYDKNSICPEPTVLGGHKSRISRPPYRHGDSVTFTCNANFTMKGNKTVWCRANKTWGPTPLPTCESDFPLECPSLPTIAHGRHTGEDVASFAPGFSVTYSCEPGYLLLGEKTIRCLSSGNWNAVSPTCKEAECQPPGPFLNGQIKKSESLRVGETVHFSCNEGYRLLGSPSSQCVIVGQRPFWTKMPICEKIFCSPPPPIRNGRHTGSSSVNIPYGSSVTYTCDPGPEEGVNFILIGESTIHCTTDSQKNGIWSGPAPHCELSVSEVRCPPPQILRGQISSRKKDQYSYNDTVVFACLFGFTMKGSKEIRCNAQGTWEPSVPVCEKDCQAPPKILHGQKEDKHVIRFDPGTSVKYSCDPGYVLVGEESIHCTIDGVWIPTVPTCKVAECNPSGKQVFKKPTNQIIRPDVNSSCDEGYRLSESVYQLCQDTIPWYMEIRLCKEITCPPPPLIYNGAHTGSASGEVLYGTTVTYTCNPGPERGVTFNLIGESTIRCISNDQETGVWSGPPPLCKLSIPTVQCSHVHIENGYKISVKEAPYFYNDTVTFKCDDGFTLKGSSRIRCKADNTWDPEIPVCEKGCQPPSGLHHGQHTGGNRVLFVSGMTVDYTCDPGYVLVGNRSIHCMPSGNWSLSAPRCEVQCQPLKEDLQELPADWPVVSVNITCQEGYQLTGHVYQKCQGDEDAVWLQKIPLCKVIHCQPLPVIKNGRHRGVVGKYFVYGNKVSYECDEGFDLLGEKTVWCTNDSKGYGSWSGPLPRCIKSPPVTHCPNPEVAHGYKLNNTNSSFSHNDIVVIACEPGFIMNGSQSIRCQTNNKWVPDVPTCIKKAFFGCHRPVKIPYGNHTGGDILRFSPGMSVLYSCNQGYLLVGEALLLCTHEGNWNQPAPYCKEVNCSFPEHVNGIQNGLEPRKMYQYGAVVTLECEEGYTLEGSPQSQCQEDHRWNPPLAVCKSPSSRVPLICGFSAGVVILCCLGIVTICMILKQRERNYYTNTSRKEDLNLETLEVYSVDPYNPEN

SEQ ID NO: 351 - protein, 1056 aa, Sus scrofa
MASDGAAPARGGPTWSPCSRRQLQRMLSAGRPHCVWDPPGPQSWAAGRPPEAHPGLYYGADEQCRVAFGPTAVACTFAREQLDMCQALSCHTDPLDQSSCSRLLIPLLDGTECGVGKWCSKGHCRSLAELAPVGAVHGGWSSWGPASPCSRSCGGGVVTRRRQCNNPRPAFGGRSCVGADLQAEMCNTQACEKTQLEFMSQQCAQTDGEPLRLSPGSTSFYHWGAAAQYSQGDTLCRHMCWAVGESFIVRRGDRFLDGTRCVPGGPRQDGTLSLCVSGSCRTFGCDGRMDSGQVPDMCQVCGGDNSTCRPQNGSFTAGRAREYVTFLTVTPNLTNIHVINHRPLFTHLAVRIRGRYVVAGNASISPSITYPSLLEDSRVEYRVALTEDRLPHREELRIRGPTQEDLEIQVYRRYGQEYGRLARPDITFTYFQPEQQQAWAWAPVRGACSVSCGAGLRQVTYSCWDQARNAWVEAALCAGSRRPAAWSESCTPAPCPPFWAVGDFGPCSASCGGGLQERAVRCVEAQGGLLRTLPRLRCRALAQQPAAVETCNAQPCPTRETSDTCPSACGAELAVQNVTCVQGAEGMGALATAGPCPTDQKPSALEPCIEVTCPPGWGHLEAQSPGEEAVSPAGSARLEVQAAHVWTPLTGPCSVSCGQGLMELYFVCVDSALGTPVQEEMCDLAARPGRRQEVCQAAPCPAWWETRALAPCPVTCGGGQVPLAVRCVRMDRGRLVPLPHAKCWPLPRPRPFEDCSPEPCPARWRYKLAACSVSCGGGVVQRILYCARAHGEDKDEEILPDTQCEGLPRPEQQEACSPEPCPPRWKVTSLGLCSASCGLGTATRSVACVQLDQGRDTEVDGAACAGLVRPQASIPCVVADCAFRWHVGAWMQCSVSCGDGIQRRHDACLGPQAQVPVPAVFCQHLPKPVTVQGCWAGPCAGQRTPSPASLEEATAPSQTTAATAGASPAWPQRGDRLLSLHPQEGPAESSYASPSFLSGRVTGFEGGWAEAPIPGISGMCSSRGSAESGCGSRDAGMRGAGLGAGPLPHGETACSL

SEQ ID NO: 352 - protein, 824 aa, Sus scrofa
MGPPRPASLLLLLLLLATTCAGAREEVPGTVGQSCPRDATRFKHLRKYVYSYEAESSSGVPGTADSRSSTKINCKVELEVPQLCSFILKTSHCSLKEVYGFNPEGKALLKKAKNSEEFAAAMSKYELRLAVPEGKQVLLYPEKEEPKHILNIKRGIISALLLPPETEETKQVLYLDTVYGNCSSDLTIKKGREHVATEISIERNLEKCDRFQPISTGVSPLALIRGMTRPLSTLIGSSQSCQYTLDPKRKHVSEAICKEQHLFLPFSYKNKYGMMAQVTQTLKLEETPKINSRFFNEGAEAVGLAFESTKSTSPPKQAEAIVKTLQELQKLHVSEQNAQRANPLHRLVTELRGLSSEAVATLLPKLMEVSSPITLQALVQCGQPQCYTHILRWLKNEKANPLLIDVVTYLVALIPEPSAERLREVFNTAKEQQSRATFYALSHVINNYHRTNPTGTQDLLEIADYLLEQIRDNCTGNEDHTYLSLRVIGNIGRTMEQLTPKLTSSVLKCIKSTQPSLLIQKAAIQALRKVELGDQVREVLLQTFLDNVSPGEKRLAAYLMLMRAPSQSDINKVTQLLPGEKNEQVKNFVASHLANILHSEESYIQELKKLVEEALKNSQLPTIMDFKKFSRNYHFSKSISLPSLDPVSTTIEGNLIFDPNNYLPKESMLKTTLRVFGFAPADLFEIGLEGKGFEPTLEALFGKQGFFPDSVNKALYWVDGQVPDRVSKVLVDHFGYTKDERREQDMVNGIMFSLENLIKDLKSKEFPEARAYLHILGEELGFVKLHDLQLLGRLLLNGVRTLQGIPQMPSHANQNTSFKEVGLP

SEQ ID NO: 353 - protein, 334 aa, Sus scrofa
MATLKEKLIVPVAEEETTIPNNKITVVGVGQVGMACAISILGKSLTDELALVDVLEDKLKGEIMDLQHGSLFLQTPKIVADKDYSVTANSKIVVVTAGVRQQEGESRLNLVQRNVNVFKFIIPQIVKYSPDCIIIVVSNPVDILTYVTWKLSGLPKHRVIGSGCNLDSARFRYLMAEKLGVHPSSCHGWILGEHGDSSVAVWSGVNVAGVSLQELNPEMGTDNDSENWKEVHKMVVESAYEVIKLKGYTNWAIGLSVADLIESMLKNLSRIHPVSTMVQGMYGIENEVFLSLPCVLNARGLTSVINQKLKDDEVAQLKNSADTLWGIQKDLKDL

SEQ ID NO: 354 - protein, 535 aa, Sus scrofa
MRSSVSQQTYSTKGGFSSNSASGGGGSRAHTSFSSVTVSQSSGSSGGAPCGPSAGGLGSRSLYNLGGSKSISVSVAGGASSGRNLGGFGLGRGAYVGLGAGRQMFGLACPPGGIQQVTVNQSLLTPLNVEIDPEIRQVRTQEREQIKTLNDKFASFIDKVRFLEQQNKVLETKWVLLQEQGQKSGVTRKNLEPLFENYISNLRMQLDSLQSERGRLDSELRNMQDLVEDFKNKYEDEINKRNAAENEFVVLKKDVDAAFMGRMDLHGKVDGLTDEINFLRHLYEEELSQMQTHVSDTNVILSMDNNRNLDLDSIIAEVKAQYEQIAQRSRAEAEAWYQSKYEELQVTAGKHGDNLRDTKNEISELTRTVQRLQGEVDAAKKQCQHLQSAIEEAEQRGDLALKDAQKKLGDLDMALHQAKEDLARLLRDYQALMNVKLALDVEIATYRKLLESEESRMSGECPSAVSISVTGNSTTVYGGGAAGFGGGISLGGSGGASKGGFSTNVGYSTVKGGPVSGSTSILRKTTTVKTSSRRY

SEQ ID NO: 355 - protein, 178 aa, Sus scrofa
LIPFVSDFLTRLKGHCQPGQKQLGSECVCLSPEEDCSHHSEDLCVLDTDSNHYFTSSACKFLAEKCLNNQQLQFLHIGSCQDGPQLEWGLERIKLSSSSTKNESCGYDTCYSWEKCSATTSKCICLLPFQCLKGGYQHYCVKMGSSTTTRTMNICEVGAIRCALRKMEILYPGRCRSN

SEQ ID NO: 356 - protein, 422 aa, Sus scrofa
MGPARLWLLGAGILASVHRQPFPAHGSKSLGGPEAPGRQLSGARPAYHKITPTLTDFALRLYKQLAAETPGNIFFSPVSISSTLALLSLGAQADTPTQILEGLGFNLTEIPEADIHRGFQSLIRTLGLPSSKLEMKVGNSLFLDKQLKPQQHFLDNIREVYGALAFSANFTDSGTTRRQINDYLRKQTYGQVVDCLEEFAQDTLMVLLNYIFFKAKWKHPFNPYQTQKQESFFVDERTSLRVPMMRQKEMHRFLYDHEVACTVLQIEYSGNAQALLILPDPGKMAQVEAALQPETLRKWDQLLLPSLLDLHLPRFSISGTYNLEEILPRIGLTNLFSLEADLSGITGQLNRTVSRVSHKAAVDMSERGTEAAAASGLLSQPQSLNTTSAPHAHFNRPFLVLLWEVTTQSLLFLGKVVNPAAG

SEQ ID NO: 357 - protein, 473 aa, Sus scrofa
MKRILIFLLAVAFVHALERGRDYEKDKVCKELASLGKDDFTSLSMVLYSRKFPSGTFEQISHLVNEVVSLTEACCAEGADPDCYDNRTSALSDKSCESDSPFPVHPGTAECCTKEGLEKKLCMAALKHQPQEFPTYVEPTNDEICEAFRKDPKGFANQFMYEYSINYGQAPLTLLVSYTKSYLSMVGSCCTSPSPTVCFLKERLQLKHLSLLTIMSNRLCSQYAAYGKDKSRLSHLIKLAQKVPTANLEDVLPLAEDVATILSKCCDSASEDCMAKELPEYTVKICDNLSSKNSKFTDCCQEKTPMDIFICTYFMPAAPRPELPDVKLPTNKDVCDKGNPKVLDQYIFELSRKTHIPEVFLSKILEPTLKSLDECCHSEDSTACFKAKGPQFKKELSSFIEKGQELCADYSENTFTEYKKKLAERLRGKWPDATETELEELVKKRSDFASKCCSINSPPLYCDSEIDAEMNTL

SEQ ID NO: 358 - protein, 368 aa, Sus scrofa
MMALVVLYCLISLVSATSWKENTLVKLSQSVADGGNLNNCWICHMSPHASHGQYLPSVVPITDFDTIPDPETFYNLSPPRLTFQVQIASGPPNTPTPCFHLSEVISIAGKMTTGPPRSLKFLLRKCDAQNPPKCTLNECVRANSDSNLCQKVKQVGYHVNGLWKACSSSHSWLDNIISKLPQNEQINDTTLGGVTCAPPGFVFVCGIGSDSPTQGWAHRCLDSWQMQGSCLLGYFRTPFSVHSLQSITSHSKSNSRLKREIMARYEDNKGQSNLIPSAGIYINRDMIRNLSATIEQIAEDTAESIAAQHTSLNSMARVVLDNRMALDFLRAKEGGVCAVAHDTCCTYINSNGEVETQVNKVSQQATWL

SEQ ID NO: 359 - protein, 581 aa, Sus scrofa
MSRQFSSRSAFSSRSSRVYSVGSPAGSGDGSRAVGSVCQARGRCGGGGGYGSHAGRFGSRSLYNLGGSKSISISLVGRSASSFCQGRGAGGGFGGGRSFGGGGFGGGGYGGGSLGDSGFGGSNFGVGGFVFSCPPGGIQEVTINQSLLEPLCLEVDPEIQRIKTQEREQIMVLNNKFASFIDKVRFLEQQNQVLQTKWELLQQINTSTWTNNLEPILESYISKLQKQVDFLNAEQMRQSSEIRSMQDVVEDYKNKYEEEINRRTSCENDFVILKKDVDASYMSKVDLQSKADILFEEVEFLKCLFQLELSQMQTNITDTNVILSMDNNRSLDLDSIIDAVRTQYELIAQKSKEEAEALYQTKYQELQITAGRHGDELKTSKMEISELNITIQRLQAEISNVRKQIDQMYTAISDAEERGDRALKDAQQKLQDMEDALQQAKEDMARLLRDYQELLGTKLSLDVEIATYRKLLEGEECRWAILQQRGYGGGSSPGGSGGYGGGSRGGSGGGYFGSRSGSGSGGSYRGSSKGSSKSGGGGSSRVQIIQTSTNTSHRARILPRLVAHTPHKAGPSPVPFPTPSL

SEQ ID NO: 360 - protein, 89 aa, Sus scrofa
MCHSDWKSGEYWIDPNQGCNLDAIKVFCNMETGETCVYPTQPSVPQKNWYISKNPKDKRHVWYGESMTDGFQVRELEPLFQDGLAQGST

SEQ ID NO: 361 - protein, 1343 aa, Sus scrofa
MRGHPRPNPVWILLFLLLPRDASADSKPQYLVLVPSQLYAGVPEKACVVLNHLNETVTLTITLEYESQGMNLLTDTQAKNAFYCSTFMVSQSSSSSASITVQVDGPTQKFMKRKPMHVTKIESLVFVQTDKPIYKPGQKVQWRVVSLDISFRPLNETVSPTTNPKKNRIFQWHRLTLQGGLSQLSFPLSEEPTLGSYKIILQKESGRKIEHSFKVDEYVLPKFEVQVKMPKVIGFLEDEFEVSVCGLYTYGKPVRGLVTINICRKYSRYSSTCHGEYSQNICEEFSQQTDNEGCFTKLVKTKIFQLRQRGYDMTLQVEAKVKEEGTGLELTGQASSKITNSLSKLEFTQIDSHYRRGLPFFGQATYKQKQPCFDNWWLEEFHTPVQHTARHIFSLSKSYIHLEPVIGTVALKGVFSFSFRVEPDFGPKALLLVYTVLPSGEVIADTRTLKIENCFVNKVNLSFSSAQILPTSDTNLKVTATAYSLCALRAVDQSVLLMKPEAELSPQSVYRLLPKKNFHSIRSRDPTEEDGEKCISAEDITHNGIVYTPKEVLDDDDAYSIFESAGLKIFTNSKIHKPRFCQRFQAAPTVYGGSQARGLIRAVAAGLRQSNTGSKEDGPAVVVKETVRKYFPETWIWKLVSLDGSGSSDLAVKVPDTITEWKASAFCLSGRAGLGLSPTISLQVFQPFFLELTLPYSVVRGEAFTLKATVFNYLSHCIRVSVQLEASPAFQAIPAEKSENSHCVCGNRQKTVYWAVTPKSLGKVNFTATAEALKSQELCGNEIPQVPELGQKDTVVKPLIVEPEGIEKEETFNTLVCAQVIPLIFLNIFHFPGDILSSAMQNLQNLVQMPYGCGEQNMVRFVPNIYVLNYLKETQQLTEKIKSKAISYLVSGYQRQLNYKHSDGSYSTFGERGGGSQGNTWLTAFVLKSFSQARAYIFVEDSHIQDSRNWLSQKQKENGCFQRSGSLFNNAIKGGVDDEVTLSAYITIALLEMPLPVTHPVVHNALLCLEKAWESISEALLAYAFTLAGNQAKRKELLESLDKEAIKTEDSIHWQRPEKSQESEFGYQPRAPSVDVEMTSYLLLARVTAQPAPSSEDLSMASRMVKWITKQQNPNGGFSSTQDTVVALQALSKYGALTFTKWEKAATVTVKSSESFSKEFQVDETNRLLLQEVTLPEIPGEYSTVVSGSGCVYLQTFLRYNVLPKKGRKAPFTLKVDTDSKNCDAVDAHRKVQIHINISYTGERPSSNMVIVDVKMVSGFIPVKSSVKKLQERPQIQRTEVNVNHVLIYFEELTSEVLSFSFSVEQDIQVKNLKPATVKAYDYYETEEFAIEEYSVPCSAGKV

SEQ ID NO: 362 - protein, 632 aa, Sus scrofa
MCSCKLIFFLSVLSKQHASQVLIRKRRANSMLEERKQGNLERECIEELCSKEEAREVFENDPETEYFYPAYLAIPDQCNPLPCNEDGYLTCKDGQAMFTCICKSGWEGEKCELDINECKDPANINGGCSQICDNTPGSYHCSCKSGFIMLSNKKDCKDVDECSVKPSICGTAVCKNIPGDFECECPEGYRYNPTLKYCEDVDECSENMCAQLCVNYPGGYSCYCDGKRGFKLAQDQKSCEAVPVCLPLNLDKNYELLYLAEQFVGVVLYLKFRLPEITRFSAEFDFRTYDSEGVILYAESSDHSAWFLIALRDGKIEIQFKNEHTTKITTGGRVINDGLWNMVSVEELEQSISVKIAKEAVMNINKPESLFKPTNGFLETKVYFAGLPRKVENALIKPINPRLDGCIRGWNLMNQGASGVKEIIQEKQNKHCLVTVEKGSYYPGSGVAQFSIDYKNVSSAGAWQVNVSLNIRPSAGTGVMLALVSGNTVPFALSLVDSATEKLQDIVVSVENVEIARIKALSLCSSLQSLLEMRVSVNSLELLTQFEKRRISSEDYQGQFAILDKAMEGTVATYLGGLPDVPFSATPVNAFYNGCMDVIINGVPLDLDEAIAKHNDIRAHSCPSVWKNTRNT

SEQ ID NO: 363 - protein, 521 aa, Sus scrofa
MIARQQCVRGRPQGFSCGSAIVGGGKKSAFSSISLSGGAGRCSSGGFGSRSLYNLGGKKSISISVAGARQGAGFGAAGCFGAGGFGTGFGAGGFGGGLGGSFGGWGGAGSLVCPAGGIQQVTINQSLLTPLHVEIDPEIQKVRTQEREQIKILNDKFASFIDKVRFLEQQKTTTSSKNLDPFFEAYISALRKQLDTLTNDKGYLQSELKIMQDSVEDFKAKYEEEINKRTAAENDFVVLKKDVDAAYMNKVELEAKVDGLNDEINFLRILYAAELSQMQTHVSDTSVVLSMDNNRDLDLDSIIAEVRAQYEEITQRSKAEAEALYQIKIQQLQISVDQHGDSLKNTKNEISELNRMIQRLRAEIENIKKQCQTLQGSVADAEQRGEAALKDAYSKRAELEAALKKAKEELARMLREYQELMSVKLALDIEIATYRKLLEGEECRMSGECQSAVSISVVGGAASAGGIGSGGVGSCSGFGLGAGFGSGSGSGFGFGSGVCGSAGSKIISTTTTSTLTKRSQR

SEQ ID NO: 364 - protein, 401 aa, Sus scrofa
MRMSLVFACLAMGLALIFAEGSASSHHQSLAARLATDFGVKVFRQVVQASKDRNVVFSPYGVASVLAMLQLTTAGDTQQQIQEAMQFKIEEKGMAPALRQLYKELMGPWNKDEISTADAIFVQRDLKLVQGFMPYFFRLFRTTVKQVDFEMDRARFIINDWVKRHTKGMINDLLGQGAVDQLTRLVLVNALYFNGQWKTPFPEKSTHHRLFHKSDGSTVSVPMMAQTNKFNYTEFSTPDGHYYDILELPYHGNTLSMFIAAPYEKEVPLSALTSILDAQLISQWKGNMTRLTRLLVLPKFSLESEVDLRRPLENLGMTDMFRPNQADFSSLSDQELLYMSQALQKVKIEVNESGTVASSSTAIIVSARMAPEEIIMDRPFLFVVRHNPTGTVLFMGQVMEP

SEQ ID NO: 365 - protein, 459 aa, Sus scrofa
MWQLASLLLLLIIWAVSSTPVPPDSVFSSSQRAHQMLRSKRANSFLEELRPSSLERECKEETCDFEEAREIFQNTENTMAFWSKYHDGDQCAVSPPEHLCDSPCCGRGTCIDGLGGFRCDCAQGWEGRFCLHEVRFSNCSTENGGCAHYCLEEEGGRRCRCAPGYRLGDDHLQCEPKVKFPCGRLGNRMEKKRKSLKRDTDQVDKKEDQIDPRLVNGKQSPWGESPWQVILLDSKKKLACGAVLIHVSWVLTAAHCLDDYKKLTVRLGEYDLRRREKWEVDLDIKEFLVHPNYTRSTSDNDIALLRLAEPATFSQTIVPICLPDSGLSERELTRVGQETVVTGWGYRSEAKTNRSFILNFIKVPVAPHNECVQAMHNKISENMLCAGILGDSRDACEGDSGGPMVASFRGTWFLVGLVSWGEGCGRLHNYGVYTKVSRYLDWIHGHIRMEEAFHKNQVP

SEQ ID NO: 366 - protein, 677 aa, Sus scrofa
MPPTISPPLLLPLLLLLLLALEPRVQGCPSGCQCNQPQTVFCTARQGTTVPLDVPPDTVGLYIFENGITTIDTGSFAGLPGLQLLDLSQNQITSLPGGVFQPLANLSNLDLTANRLREITNETFRGLRRLERLYLGKNRIRHIQPGAFDALEHLLELKLQDNELRALPPLRLPRLLLLDLSHNSLPALEPGVLDTANVEALRLAGLGLQQLDEGLLGRLRNLHDLDVADNQLERVPPAIRGLRGLTRLRLAGNTRIAQLRPEDLAGLAALQELDLSNLSLQVLPHELSILFPRLRLLAAARNPFNCVCPLSWFGPWVRESRVALTSPEETRCHFPPKNAGRLLLDLDYADFGCPATTTTATVPATRPTVGEPTFPPSSPAPTWLSPTEPATVAPSLPPPAPPTEGPAPQPQDCPASICLNGGTCHLEARGHLECLCPEGFTGLYCESRVRQGPRPSSAPATLQPPRPLPLSIEPVSPTSLRVGLQRYLQGSPLQLRSLRLTYRNLSGPDKRPVTLRLPASLAEYTVTQLRPNATYSICVRPLGAGRMPEGEEACGEARTPPAVRSNHAPVTQAREGNLPLLIAPTLAAVLLAVLAAVGAAFCVRRGRAAAAVAQGKGQVGPGAGPLELEGVKAPLEPGPKGTEGGGEAPPGGPECEVPLMGYSGPGPQGPLPTKPYI

SEQ ID NO: 367 - protein, 95 aa, Sus scrofa
MNINKPESLFKPTNGFLETKVYFAGLPRKVENALIKPINPRLDGCIRGWNLMNQGASGVKEIIQEKQNKHCLVTVEKGSYYPGSGVAQFSIDYSK

SEQ ID NO: 368 - protein, 1645 aa, Sus scrofa
MGSTSGPRLLLLLLTSLPLALGDPIYTIITPNVLRLESEEMVVLEAHEGQGDIRVSVTVHDFPAKRQVLSSETTTLNNANNYLSTVNIKIPASKEFNVQVEKVVLVSLQSGYLFIQTDKTIYTPGSTVLYRIFTVDHKLLPVGQTIVVTIETPEGIDIKRDSLSSHNQFGILALSWNIPELVNMGQWKIRAHYEDAPQQVFSAEFEVKEYVLPSFEVQVEPSEKFYYIDDPNGLTVNIIARFLYGESVDGTAFVIFGVQDGDQRISLSQSLTRVPIIDGTGEATLSQGVLLNGVHYSSVNDLVGKSIYVSVTVILNSGSDMVEAERTGIPIVTSPYQIHFTKTPKFFKPAMPFDLMVYVTNPDGSPARHIPVVTEDFKVRSLTQEDGVAKLSINTPDNRNSLPITVRTEKDGIPAARQATKTMHVLPYNTQGNSKNYLHLSVPRVELKPGENLNVNFHLRTDPGYQDKIRYFTYLIMNKGKLLKVGRQPRESGQVVVVLPLTITTDFIPSFRLVAYYTLIAANGQREVVADSVWVDVKDSCVGTLVVKGGGKQDKQHRPGQQMTLEIQGDRGARVGLVAVDKGVFVLNKKNKLTQRKIWDVVEKADIGCTPGSGKDFAGVFTDAGLAFKSSKGLQTPQRADLECPKPAARKRRSVQLMEKRMDKLGQYSKELRRCCEHGMRDNPMKFSCQRRAQFIQHGDACVKAFLDCCEYIAKLRQQHSRNKPLGLARSDLDEEIIPEEDIISRSQFPESWLWTIEEFKEPDKNGISTKTMNVFLKDSITTWEILAVSLSDKKGICVADPYEVVVKQDFFIDLRLPYSVVRNEQVEIRAILYNYREAEDLKVRVELLYNPAFCSLATAKKRHQQTLTVPAKSSVPVPYIIVPLKTGLQEVEVKAAVYNHFISDGVKKTLKVVPEGMRVNKTVVTRTLDPEHKGQQGVQREEIPPADLSDQVPDTESETKILLQGTPVAQMVEDAIDGDRLKHLIQTPSGCGEQNMIGMTPTVIAVHYLDSTEQWEKFGLEKRQEALELIKKGYTQQLAFRQKNSAFAAFQDRLSSTWLTAYVVKVFAMAANLIAIDSQVLCGAVKWLILEKQKPDGVFEENGPVIHQEMIGGFKNTEEKDVSLTAFVLIALQEAKDICEPQVNSLLRSINKARDFLADYYLELKRPYTVAIAGYALALSDKLDEPFLNKLLSTAKERNRWEEPGQKLYNVEATSYALLALLVVKDFDSVPPIVRWLNEQRYYGGGYGSTQATFMVFQALAQYQKDVPDHKDLNLDVSIHLPSRSAPVRHRILWESASLLRSEETKENERFTLIAEGKGQGTLSVVTMYHAKTKGKTTCKKFDLKVSIHPAPEPVKKPQEAKSSMVLDICTRYLGNQDATMSILDISMMTGFSPDTEDLKLLSTGVDRYISKYELNKALSNKNTLIIYLDKISHTLEDCISFKVHQYFNVGLIQPGSVKVYSYYNLDESCTRFYHPEKEDGMLNKLCHKEMCRCAEENCFMHHDEEEVTLDDRLERACEPGVDYVYKTRLLKKELSDDFDDYIMVIEQIIKSGSDEVQVGQERRFISHIKCREALKLKEGGHYLVWGVSSDLWGEKPNISYIIGKDTWVELWPDGDVCQDEENQKQCQDLANFSENMVVFGCPN

SEQ ID NO: 369 - protein, 284 aa, Sus scrofa
MRPPGRRGVPPVPPALLLLLLPLLVVLLGAPRGVGAGTGASVPAELRVRVRLPDGQVTEESLQADSDADSISLELRKPDGTLVSFTADFKKNVKIFRALILGELEKGQSQFQALCFVTRLQHNEIIPSEAMAKLRQKNPRAVRQAEEVRGLEYLHMDIAVNFSQGGLLSPHLRNVCAEAADAIYTRQEDVQFWLEQGVDSSVFEALPQASEQVSLPRCGQVGDRGKPCLCHYGLSLAWYPCMLKYCHSRDRPAPYKCGIRSCQKSYSFSFSVPQRQLCLWDEDP

SEQ ID NO: 370 - protein, 2911 aa, Sus scrofa
MRKHRHLPLVAIFCLFFSGFSFTRAQQQADVKKGAAADIIFLVDSSWSIGKEHFQLVREFLYDVIKSLAVGENDFRFALVQFNGNPHTEFLLNTYRSKQDVLSHVSNLSYFGGSNQTGKGLEYVMQNHLTEAAGSRARDGVPQVIVVLTDRPSKDGLVLPSAELKSADVNVFAVGVEDADEGALKEIASEPLNMHVFNLENFTSLHDLVGNLVSCVHSSMTPEGAGGTETLKDITAQESADIIFLIDGSNETGSVHFAVILDFLVNLLERLSVGAQQIRVGVVQYSDEPRTMFSLNSFATKAQVLDAVKALGFLGGELANVGLALDFVVDHHFTRAGGSRVEEGVPQVLVLISAAPSSDKIRDAVLALKQASVFSFGLGAQAASKAELQHIATNDNFVFTVPEFRSFGDLQDQLLPYIVGIAHRHIVLQPPTIVTQVIEVNKRDIVFLVDGSSALGPANFQAIRDFIAKVIQRLDIGQDLIQVAVAQYADTVRPEFYFNTHPNKREVMAAVRRMKPLDGAALYTGSALEFVRNNMFTSEAGYRAAEGVPRLLVLITGGKSLDDVSQPAQELKRSSIMAFAVGNKAADQAELEEIAFDPSLVFIPTEFRASPLQGVLSSLLAPLRTLSGTTEDPAVTLVTMDIIFLLDGSVNVGRTRFPYVRDFVMNLVNSLDVGGDNIRVGLVQFSDTPVTEFSLNTYQTKSDLLAHVRQLQLKGGSGLNTGAALSYVHANHFTEAGGSRIQEQVPQLLLLLTAGPSEDSYLQAANALARSGILTFCVGASQANKAELEQIAFNPSLVYLMDDFSSLPALPQQLIQPLTTYVSGGVEEVPLAQPESKRDILFLFDGSGNLLGQFSAVRDFLYKVIDELDVKPDGTRIAVAQYSDNVRIESSFAEHQTKPEILNLVKRMKLKTGKALNLGYALDFAQRYIFVKSNGSRIEDGVLQILVLLVAGRSSDSVDRPALNLKQSGVVPFILQAKNADPGELELIVPSPAFILAAESLPKIGDLQPHIVNLLKSVQNGAPTPVSGEKDVVFLIDGSEGVRSGFPLLKEFVQRVVESLDVGPDRVRVAVVQYSDRTRPEFYLNSYMDQQSVVNAVRQLTLLGGPIPNTGAALDFVLRDILTESAGSRIAEGIPQLLIVLTADRSGDDVRGPSVVLKRGGAVPIGIGIGNADITEMQTISFIPDFAVAIPTFRQLGTVQQVISERVTRLDREELRRLQASVVPLTSVSGKRDVVFLIDGSQTAGPEFQYIRTLIERLVDSLDVGFDTSRVAVIQFSEDPRVEFLLNAHSSKDEVQNAVRRLRPKGGRRINIGGALEYVSKNIFKRPLGSRIEEGVPQFLILISSGKSDDEVDDSAAELKQFGVAPLTIARNADPEELVKISLSPEYVFSVSTFRELPSLEQKLLTPITTLTAEQIQQLLASTRPDIVSMRIDAADIVFLIDSSDGVKPDGIAHIRDFVIRIVRRLNIGPNKVRVGVVQFSNDVFPEFYLKTYRSQASVLDAIRRLRFKGGSPLNTGKALEFVARNFFVKSAGSRIEDGVPQHLVLFLGGKSQDDVSRYSQVMGSSGIVRLGVGDRNIDRTELQTITNDPRLVFTVREFRELPNIEERVMNSFGPSGVTPAPPGKKKADIVFLLDGSINFRRDSFQEVLRFVSEIVDTVYEGGDSIQVGLVQYNSDPTDEFFLKDFSTKQQIIDAINKVVYKGGRHANTKVGLEHLRLNQFVPEAGSRLEQRVPQIAFVITGGKSVEDAQEASLALTQRGVKVFAVGVRNIDSEEVGKIASNSATAFRVGNVQELSELSEQVLETLHDAMHETLCPGVTDISKACNLEVILGFDGSRDQNIFVAQKGFESKVDTILNRISQMQRISCSGTQMPTVRVSVVATTPAGPVEAFDFAEYQPEMFEKILGMRTQHPYVLTADTLKLYQNKFRQGSPGSVKVVIHFTDGADGDLADLQRASEALRQEGVQALILVGLERVPNLEQLMQLEFGRGFTYNRPLRLNLLDLDYELAEQLDNIAEKACCGVPCKCSGQRGDRGPIGSIGPKGIPGEDGYRGYPGDEGGPGERGPPGMNGTQGFQGCPGQRGIKGSRGFPGEKGELGEIGLDGLDGEDGDKGLPGTSGDKGSPGRRGDKGPKGDKGERGDVGIRGDPVRGTFRRPWKMPFPVSSVSVPPHLPPPPRPTGPLECPVFPTELAFALDTSEGVTQDTFSLMRDVVLRIVDELTIAESNCPRGARVAVVTYNNEVITEIRFADSRKKSVLLDKIKNLQVVLTSKQQSLETAMSFVARNTFKRVRNGFLMRKVAVFFSNKPTRASPQLREAVLKLSDAGITPLFLTSQEDRVLINALQINNTAVGHALVLPARRDLPDFLKNVLTCHVCLDICNIDPSCSLGSWRPSFRDRRAAGSDVDIDMAFIVDSSETTTPFQFNEMRKYIGYVVRQLDLSPDPKASQHFARVAVVQHAPWESVGNASVPPVKVDFSLTDYGSKEKLVAFLSSRMTQLQGTRALGSAIYYTVENVFESAPNPRDLKIVVLMLTGEVQKEQLEEAQRAILQAKCKGYFFVILGIGRKVNVKELYSFASEPNDVFFKLVDKSSELNEEPLMRFGRLLPSFVSSENAFYLSPDVRKQCDWFQGDQPAKNLVKFGHKQVPASKPVTTTKPVTTTEPVTATTKPVTMVNLPASKLAAPKPVAGRPVATKTEATKPEVTKTEAAKPETTKPVAAKPETAKPVAAKPEAAKPVAARPEAAKVHVSEITENSAKLHWERPEPPSPYFYDLTVTSAQDQSLVLKQNLTVPDRVIGGLLAGQTYHVSVVCYLKSQVRATYHGSFSTSKSTVGLWKVASSSTINLMVNTEPLAGSEADVCKLPKDGGTCRKFIIKWYHDAVTGNCARFWYGGCGGNENRFDSQEECEKVCSPGK

SEQ ID NO: 371 - protein, 375 aa, Sus scrofa; identical to SEQ ID NO: 131

SEQ ID NO: 372 - protein, 2807 aa, Sus scrofa
MVPVRLARVLLALALTLPGALCGEETLGKSSMARCSLFGSNFINTFDQSMYSFAGSCSYLLAGDCQKHSFSIIGDFQDGKRVGLSVYLGEFFDIHVFVNGTVLQGDQSISTPYASKGLYLESQAGYHTLSSEAYGFVARIDGSGNFQVLLSDRYFNKTCGLCGDFNIFSEDDFKTQEGTLTSDPYSFANSWALSSGEQHCQRAAPPSISCNISSEMQKGLWEQCQLLKSASVFARCHPLVDPEPFVALCEKMLCPCAQGLQCPCPALLEYARACAQQGMLLYGWMDHSLCRPDCPAGMEYRECVSPCTRTCQSLHINEVCQEQCVDGCSCPEGQLLDDGRCVESAECSCVHSGKRYPPGASLSRDCNTCICRNSLWVCSNEDCPGECLVTGQSHFKSFDNRHFTFSGVCQYLLARDCQDHTFSVIIETVQCADDPDAVCTRSVTVRLPSPHNSLVKLKHGGGVAMDGWDVQIPFLQGDLRIQHTVMASVHLSYGEDLQIDWDGRGRLLVKLSPVYAGRTCGLCGNYNGNQGDDFLTPAGLVEPLVEHFGNAWKLHGDCEDLRKQPTDPCSLNPRLTRFAEEACAILTSPKFQACHDAVGPLPYLQNCHYDVCSCSDGRDCLCDAVATYAAACARRGVHIGWREPGFCALSCPPGQVYLQCGTPCNLTCRSLSYPDEECAEDCLEGCFCPPGLYLDGSGDCVPKAQCPCYHDGEIFQPEDIFSDHHTMCYCEDGFMHCSRAGAPGSLQPEVVLSSPLSHRSKRSLSCRPPMVKLVCPADNPRAEGLECAKTCQNYDLECVSTGCVSGCLCPPGMVRHENRCVALQRCPCFHQGREYAPGETVKVDCNTCVCRDRKWSCTDHVCDASCSALGLAHYLTFDGLKYLFPGECQYVLVQDYCGSNPGTFRILLGNEGCGYPSLKCRKRVTILVDGGEIELFDGEVMVKKPLKDETHFEVVESGRFITVLLGSGLSVVWDRHLGISVFLKQTYQEQVCGLCGNFDGVQNNDLTGSSLQVEEDPVDFGNSWKVSPQCADTRKVPLDTSPATCHNNVMKQTMVDSSCRILTSDIFQDCNKLVDPEPYLDVCIYDTCSCESIGDCACFCDTIAAYARVCAQHGKVVTWRTATLCPQNCEERNLREDGYQCEWRYNSCAPACPVTCQHPEPLACPVSCVEGCHAHCPPGKILDELLQTCVSPEDCPVCEAAGRRLAPGKKITLNPRDPAHCQICHCDGVNLTCEACAEPVPPTEGPVSPTTPYEEDTPEPPLHDFFCSKLLDLVFLLDGSDKLSEADFEALKVFVVGMMEHLHISQKHIRVAVVEYHDGSHAYISLQDRKRPSELRRIASQVKYAGSEVASISEVLKYTLFQIFGRVDRPEASRIALLLMASQEPRRLAQNLARYLQGLKKKKVTVIPVGIGPHVSLKQIRLIEKQAPENKAFVVSGVDELEQRKNEIISYLCDLAPEVPAPTRRPLVAQVTVAPELPGVSTLEPKKRMVLDVVFVLEGSDKVGEANFNRSTEFVEEVIRRMDVGRDSVHVTVLQYSYVVAVEHSFREAQSKGEVLQRVREIRFQGGNRTNTGLALQYLSEHSFSASQGDREEAPNLVYMVTGNPASDEIKRMPGDIQVVPIGVGPDVDMQELERLSWPNAPIFIQDFETLPREAPDLVLQRCCSGEGPHLPTQAPVPDCSQPLDVVLLLDGSSSLPASYFDEMKSFTKAFISKANIGPQLTQVSVLQYGSITTIDLPWNMPLEKAHLRGLVDLMQREGGPSQIGDALGFAVRYVMSQVHGARPEASKAVVIMVTDTSTDSVDAAAAAARSNRVAVFPIGIGDRYDEAQLRTLAGPGASSNVVKLQRIEDLPTLVTLGNSFLHKLCSGFVRVCIDEDGSERKPGDVWTLPDQCHTVTCLPDGQTLLKSHRVNCDQGLQPSCPSNQPPIRVEEACGCRWTCPCVCTGSSTRHIVTFDGQNFKLMGNCSYVLFHNKEQDLEVILHNGACGAGARQACMKSIEVKHNGLSVELHRDMEVVVNGRQVSVPYVGGNMEVGIYGTIMYEVRFNHLGHILTFTPQNNEFQLQLSPKTFASKMYGLCGICDENGANDFMLRDGTVTTDWKTMVQEWAVQQPGQMCQPVPKEQCPVSGGYQCQVLLSALFAECHKVLAPAAYFAICQQDSCHQEQVCEAVASYAHLCQTKGVCVDWRTPDFCAVSCPPSLVYNHCEHGCPRHCEGNSSSCGDHPSEGCFCPPHQVMLGSSCVPEEACTQCVDDDGIRHQFLETWVPDHQPCQICTCLSGRRVNCTLQPCPTARAPACGLCEVARLRQGAHQCCPEYECVCDLVSCDLPPVPHCEGGLQPTLTNPGECRPNFTCACRKEECPRGPLPSCPPHRTPALRKTQCCDEYECACNCVNTTLSCPLGYLASTVTNDCGCTTTTCLPDKVCVHRGTVYPVGQFWEEGCDVCTCTDLEDAVMGLRVAQCAQKPCEDSCRPGFTYVLHEGECCGKCLPSACKVVIGSFRGDSVSYWKSVGSHWASPENPCLINECVRVKEEVFVQQRNVSCPMLDVPTCPVGFQLSCKTSGCCPTCRCEPVEACLLNGTIIGAGESLMIDVCTTCRCMLQEGVVFGFKLECKKTTCEACPLGYKEEKMPGECCGRCLPTACTIQLRGGQIMTLKRDETLQDGCDSHFCRVNERGEYIWEKRITGCPPFDQHKCLAAGGKIMKIPGTCCDTCEEPECKDMTARLQYVKVGNCRSEEEVDIHYCQGKCTSKAVYSIDTEDVEDQCACCSPTRTEPMQVPLRCTNGSTIYHEVLNAIQCKCSPRKCSK

SEQ ID NO: 373 - protein, 151 aa, Sus scrofa
HKAKRALCYTASCQPRSCSGHGQCVEVINNYTCNCDAGYYGPQCQFVTQCEPLGDPELGTMACIHPLGKFYFTSQCTFNCSEGTDITGIEETTCGPFGNWSSPEPTCRELDRNFSINKEVDYNPLFIPVAVIVTAVSGLAFIIFLARKLKK

SEQ ID NO: 374 - protein, 198 aa, Sus scrofa
VKGFSLLPGLQEFRVDNTTSVSVPMLSGTGTFHYWSDDQNNLSVIRVPLSAHASLLLIQPHTFDLHKVEALTFQHNFLTWTKNLSPRAIRLTMPQLTLQGSYDLQDLLAQTKLPTLLGAEANLRKISDDDLRVGKVLNSVLFELKADEGEQPTESALQPAGPEALEVTLNSPFLLAVLERESAALTFLGRVANPISAA

SEQ ID NO: 375 - protein, 550 aa, Sus scrofa
MVSNMKLAHVILLLLCFYLSFCKPTSGSDTSQEDLVEKKCLTEKYTHLSCDKVFCQPWQKCIDGTCICKLPYQCPKNGTSVCSTNGKSYPTYCQQKSFECLRPEAKFLKSGACTGEEQFSVSLDRGNGDSEGIVEVKLVDQDKKMYICAKSWSLTQANVACLDLGFKLGALYTQRRDPHINSPECLHVHCRGSETSLAECTFTKGTTSRSEGLAGVVCYTENAVSPTNDYFQCVNGKHISQKKTCDGINDCGDQSDELCCKGSEHPEIKEETEMLTADMNAERKRIKSFFPKLSCGVKSSTHIRRKRVVGGQPAEVGDFPWQVAIKEGEKINCGGIYIGGCWILTAAHCVRASKAPRYQIWTSFTDWLNPDPQIVVQFVKQVIIHEKYNGTTYQNDIALIEMKKQPGRSECVLLKSVPACVPWSPHLFQPNDKCIVSGWGREKDNKKVYSLKWGEVHLISNCSKFYLNRFFEKEMVCAGTDDGSIDACKGDSGGPLVCTDANNMTYVWGVVSWGENCGKPEFPGVYTKVANYFDWISLHVGRPLISQHNV

SEQ ID NO: 376 - protein, 1478 aa, Sus scrofa
MERNKLLHPSLTLLLLLFLPTDASVSGKPQYLVLVPSLLHTGTPEKGCLLLSHLNETVTVSASLESLRENRSLFTNILAEKDLFNCVSFTVPRSSSHEEVMFLTVQVKGATQEFKKRTTVLVKNEESLAFVQTDKPIYKPEQTVMFRVVLLDENFHPLNKLIPLVYVEDPKGNRIMQWQHLQVENGLKQLSFPLSSEPFQGSYKVVVQQESGETAEHPFTVEEFVLPKFEVQVRTPQIITILEKAVNVSVCGLYTYGKPVPGHVTISICRKYSNPSTCFGGESQAICEKFSGELNSQGCFSQSVETKVFQMKRQEFEMKLEVEAKIKEEGTEVELTGKGSTEITRTITKLSFVKVDSYVRRGIPFFGQVRLVDGKGVPVPKKVIFITANEAKYESNATTDEHGLVQFSINTTEIMGTSLTIRVKHKDHSPCYGYQWVSEEHEEAYHTANLVFSQSKSFVHLEPVPQELPCGQTQTVQAHYVLNGQVLRELKELVFYYLIMSKGGIVRAGTHTLPVEQGDMKGSFSLSFPVEADLAPIARLLIYAILPDGEVVGDSAKYEVENCLPNKVGLHFNPAQGLPGSHAHLQVTASPKSLCGLRAVDQSVLLLKPEAELSPTTVYNLLPVKDLNSFPESLNQQEEDNEDCISQHNVYINGIMYSPVSNTNEKDVYSFLQDMGLRVFTNTKIHKPKICSPLPLYEMQTSRRLLASPALAEMDRGGHALMNMVRISEPLATETVRKYFPETWIWELVPVNDSGVAEIEVTIPDTITEWKAGALCLASDIGLGLSPTASLQAFQPFFVELTMPYSVIRGEGFTLKATVFNYLPKCIRVSVHLMDSPAFLAVPEEKEEKAHCICGNGRQTVSWAVTPKSLEKVNFTVTAEALSSQELCGTEAAMVPEYGRKDTIIKSLLVEPEGLEKEVTFNSLLCPSDAGASEQLSLKLPPNVVEDSARAFFSVLGDLLGSAMRNTQNLLQMPYGCGEQNMVLFAPNIYVLDYLNETQQLTAEIKSKAIRYLNTGYQRQLLYKHYDGSYSTFGEHYGRSEGNTWLTAFVMKTFAQARTYIFIDETHITEALTWLSQKQKDNGCFRSSGSLLNNAIKGGVDDEVTLSAYVTIALLEIPLAVTHPVVRSALFCLETAWKSAQEGSQGSHVYTKALLAYAFALAGNQEKKKEVLQSLDAEAVKEGDSIHWTRPRKPEAPVQHFYKPRAPSAEVEMTAYVLLTCLTAQSALSSEDLNLATLIMKWITKQQNSQGGFSSTQDTVVALHALSKYGAATFTRTGKAAEVTIQSTGTFSKKFQVNNDNLLLLQQISLPAVPGEYSITATGKGCVYLQTSLKYNILPKKEDFPFALEVQTLPPTCEPKAHTSFQISVNVSYTGSRPASNMAIVDVKMVSGFIPLKPTVKMLERSDNVSRTEVSSNHVLIYLDKVTDQSLSMSFTVTQDIPVRDLKPAIVKVYDYYETAEFAIAEYNAPCSKDPGNV

SEQ ID NO: 377 - protein, 982 aa, Sus scrofa
MKIFLLGIFLILCGTSARAKDKHYYIGIVETTWDYASDRGEKKLISVDKEQSNIYLQNGPNRIGRLYKKAIYLQYTDETFRTIIEKPVWLGFLGPIIKAETGDRVYVHFKNFASRPYTFHAHGMTYYKEHEGAIYPDNTTDFQKADDKVHPGEQYTYILHANPEQGPGKEDSNCVTRIYHSHIDAPKDIASGLIGPLIHCRKDSLDKEKEKNIDQEFVVMFSVVDENLSWYLEDNIKTYCSEPEKVEPDNEDFKESNRMYSVNGYSFGSLPGLSMCAEDRVKWYLFGMGNEIDVHAAFFHGQVLTNKNYRIDTINLFPATLFDAFMVAQNPGEWMLSCQNLNHLKAGLQAFFRVQDCKKTSSEDAIHGKHVRHYYIAAEEIIWNYAPSGIDTFTKENLTAPGSASEVFFTRGSTRIGGSYKKLVYREYKDASFTNRKERGPEEEHLGILGPVIWAEVGDTIRVTFRNKGAYPLSIEPTGVRVSKSQEGTYYASHYISSSEMFDENESLLLDDNIQMFTTEPNKVDKENEDFQESNKMHSMNGFMYGNQPGLNMCQGDSVVWYLFSAGNEVDVHGIYFSGNTYLSRGERRDTANLFPQTSLRLFMQPDTAGTFDVECLTTDHYTGGMKQKYTVNQCKQLNENSYLYLGERTYYIAAVEVEWDYSPSREWEKELHHSQERNVSNAFLDKGEFYIGSKYKKVVYRQFTDSTFQVPVQRKAKEEHLGILGPQLHADVGDKVNIVFKNTATRPYSIHAHGVKTESPTVIPTVPGETRTYVWKIPERSGAGIDDSPCIPWVYYSTVDQVKDLYSGLIGPLIVCRKPYLKVFNPIKNLEFSLLFLVFDENESWYLDDNIKTYSDHPEKVDKANDEFIESNKMHAINGRMFGNLQGLTMHVGDEVNWYLMGMGNEIDLHTVHFHGHSFQYQHRGIYTSDVFDIFPGTYQTLEMFPKTSGTWLLHCHVTDHIHAGMETTYTVLPNEETKSG

SEQ ID NO: 378 - protein, 163 aa, Sus scrofa
GGSYKKLVYREYKDASFTNRKERGPEEEHLGILGPVIWAEVGDTIRVTFRNKGAYPLSIEPTGVRVSKSQEGTYYASHYISSSENVPPSASHVAPKETFTYEWTVPKEVGPTYKDPVCLTKMYYSAVDPTKDIFTGLIGPMKICKKGSLLANGRLELHHSQER

SEQ ID NO: 379 - protein, 935 aa, Sus scrofa
MKGLTCFLLCFLLSEAQGFEIPTNGLSEFAEYGDLAELALGKFHVVPGNRRSQEGVDQVTLYSYKVQSTITSRMANTVIQTKVVNHSPEPQDVVFDIQIPKGAFISNFSMTVDGTKFTSSIKEKTVGRALYWQARAKGKTAGLVRSRALDMENFKTEVNIAPGAKVQFELHYQEVKWRNLGSYEHRIHLQPGRLAKHLEVDVQIIEPQGLRFLHVLDTFDGHFDGVPVVVKGQQKAHVAFKPTVAQQRKCPSCSETAVDGELVVMYDVNREQKAGELQLFNGYFVHFFAPESMDPIPKNILFVIDVSGSMWGIKMKQTVEAMKTILDDLRAEDQFSLVDFNHNIRTWRNDLVSATKTQVADAKTYIEKIQPSGGTNINEALLRAIFILNEANNLGLLDPNSVSLIILVSDGDPTVGELQLSKIQKNVKQNIQDNVSLFSLGIGFDVDYDFLKRLSNDNRGMAQRIYGNQDTASQLKKFYNQVSTPLLRNVQFNYPQASVTDVTQNSFPNYFGGSEIVVAGKFNPEKLEQLQGIITATSANVELVLETLAEMDGLEAFLAKDRHADPDFTKKLWAYLTINQLLDERSRAPSAAVKKKITKSILQMSLDHHIVTPLTAMVVENEAGDERMLADAPPQDQSCCSGTLNYGRKVTPNSLPSWVNPLPTPRVPLPAVGPSVIEATPPPHVMRVENDPHFIIYLPRSQQNICFNIDSEPGKILNLVSDPESGIVINGQLISAKKLKDGKLSTYFGKIGFYFQHEDVKVEISTETISLSRGSRVSVLSWSDSALVLNQRVHISVKKEKTVTVTLDQEVSFSVLLHRVWKKHPINVDFLGIYIPPTTKFSPKAHGLIGQFMHEPEIRIFNERPGKDPEKPEASMEVKGQTLVVTRGLQKDYRTDRVFGTDVPCWFVHNSGKGFIDGHYKDYLVPLLYSFLKRP

SEQ ID NO: 380 - protein, 782 aa, Sus scrofa
MQVLVMLLAAAGTYLGLLTAPTAASNPGRQDTPSTLPLHRRQKRDWIWNQMHIDEEKNGSLPHYVGKIKSSVNHKNTKYQLKGESAGKVFRVDENTGDVYAFERLDREKIPEYQLVALVVDKNTEKNLESPSSFTIKVHDINDNWPVFTQLVFNASVPEMSVIGTSVIQLTAVDADDPTVADHASVIYRLKEGEEHFRIRGPGLIETASKNLDRETVPMYKIVVETQDAQGLRGDSGTATVFITLQDVNDNFPVFTQTRYTFSVPEDIRVGSPLGSLFVKDPDEPQNRKTKYSIVQGEYRDTFTIEPDPTRNEGIIKPMKPLDYERIQQYSFTIEATDPTIDLRYLSGTSTKNIARVIINVTDVDEPPNFKQPFYHFQLRENEKKPWIGSVLAVDPDAAQRSIGYSIRRTSDKGQFFGINKHGNIYNVKELDREVYPWYNLTVEAKELDSRGTPTGKESIVQVHIEVLDENDNAPEFAKPYEAKVCEDAPQGKLVVQISAIDKDVTPRDVKFKFSLSTEDSNFTLTDNHDNTANITVKHGYFDRERAKVHHLPILISDNGRPSLTGTSTLHVTVCKCNERGEFTLCEEMGAQVGVSIQALVAIFLCILTIAVISLLVYLRRRLRKQARAHGKSVPEIHEQLVTYDEEGGGEMDTTSYDVSVLNSVRHGGAKPPRPALDARPSLYAQVQKPPRHAPGAHAPGEMAAMIEVKKDEADHDGGGPPYDTLHIFGYEGAESIAESLSSLGTDSSDSDIDYDFLNDWGPRFKMLAELYGSDPREELLY

SEQ ID NO: 381 - protein, 683 aa, Sus scrofa
MALLGRLLPLALALALGPAATHAGPAKSPYQLVLQHSRLRGRQHGPNVCAVQKLIGTNKKYFTNCKQWYQRKICGKSTVISYECCPGYEKVPGEKGCPAVLPLSNLYETLGVVGSTTTQLYTDRTEKLRPEMEGPGSFTIFAPSNEAWASLPAEVLDSLVSNVNIELLNALRYHMVDRRVLTDELKHGMALTSMYQNSNIQIHHYPNGIVTVNCARLLKADHHATNGVVHLIDKVISTVTNNIQQIIEIEDTFETLRAAVAASGLNTLLEGDGQYTLLAPSNEAFEKIPAETLNRILGDPEALRDLLNNHILKSAMCAEAIVAGLSLETLEGTTLEVGCSGDMLTINGKPIISNKDVLATNGVIHFIDELLIPDSAKTLFELAAESDVSTAVDLFRQAGLGSHLSGNERLTLLAPMNSVFKDGTPRIDARTKNLLLNHMIKDQLASKYLYHGQTLDTLGGKKLRVFVYRNSLCIENSCIAAHDKRGRYGTLFTMDRMLTPPMGTVMDVLKGDNRFSMLVAAIQSAGLTETLNREGVYTVFAPTNEAFQALPLGERNKLLGNAKELANILKYHVGDEILVSGGIGALVRLKSLQGDKLEVSSKNSLVTVNKEPVAEADIMATNGVVHTINTVLRPPANKPQERGDELADSALEIFKQASAFSRATQSSVKLAPVYQRLLERMKH

SEQ ID NO: 382 - protein, 224 aa, Sus scrofa
MERLLLWVSVLASLPEAFAHRDLTGKVFVFPRESATDHVKLITKLEKPLQNFTLCFRAYSDLSRGYSLFSYNLQGKDNELLVFKHRIGEYSLYIGKTKVTFKVREVFPRPVHICTSWESSTGIAEFWINGEPLVKKGLRQGYSVGAYPRIVLGQEQDSYGGGFDKTQSFVGEIGDLYMWGSVLSPNEIRLVYQGLSFPHPTILDWQALNYEMNGYVVIKPRVWS

SEQ ID NO: 383 - protein, 616 aa, Sus scrofa
MRALLLLGILLVSLESALLIPPWKDPRKHKVMASEHTVVLTVTGEPCHFPFQYYRQLYYKCIQRGQRGPRPWCATTPNFEKDQRWAYCLEPMKVKDHCNKGNPCQKGGTCVNMPNGPHCICPDHFTGKHCQKEKCFEPQFLQFFQENEIWHRFEPAGVSKCQCKGPKAQCKPVASQVCSTNPCLNGGSCLQTEGHRLCRCPTGYAGRLCDVDLKERCYSDRGLSYRGMAQTTLSGAPCQPWASEATYWNMTAEQALNWGLGDHAFCRNPDNDTRPWCFVWRGDQLSWQYCRLARCQAPIGEAPPILTPTQSPSEHQDSPLLSREPQPTTQTPSQNLTSAWCAPPEQRGPLPSAGLVGCGQRLRKRLSSLNRIVGGLVALPGAHPYIAALYWGQNFCAGSLIAPCWVLTAAHCLQNRPAPEELTVVLGQDRHNQSCEQCQTLAVRSYRLHESYSPKTYQHDLALVRLKETADGCCAHPSPFVQPVCLPRSVASSAEPEGALCEVAGWGHQFEGAEEYSSFLQEAQVPLISPERCSAADVHGAAFTPGMLCAGFLEGGTDACQGDSGGPLVCEDETAERQLVLRGIVSWGSGCGDRLKPGVYTDVANYLAWIQEHTTS

SEQ ID NO: 384 - protein, 333 aa, Sus scrofa
MVKVGVNGFGRIGRLVTRAAFNSGKVDIVAINDPFIDLHYMVYMFQYDSTHGKFHGTVKAENGKLVINGKAITIFQERDPANIKWGDAGATYVVESTGVFTTMEKAGAHLKGGAKRVIISAPSADAPMFVMGVNHEKYDNSLKIVSNASCTTNCLAPLAKVIHDHFGIVEGLMTTVHAITATQKTVDGPSGKLWRDGRGAAQNIIPASTGAAKAVGKVIPELNGKLTGMAFRVPTPNVSVVDLTCRLEKPAKYDDIKKVVKQASEGPLKGILGYTEDQVVSCDFNSDTHSSTFDAGAGIALNDHFVKLISWYDNEFGYSNRVVDLMVHMASKE

SEQ ID NO: 385 - protein, 1661 aa, Sus scrofa
MGSTSGPRLLLLLLTSLPLALGDPIYTIITPNVLRLESEEMVVLEAHEGQGDIRVSVTVHDFPAKRQVLSSETTTLNNANNYLSTVNIKIPASKEFKSEKGHKFVTVQALFGNVQVEKVVLVSLQSGYLFIQTDKTIYTPGSTVLYRIFTVDHKLLPVGQTIVVTIETPEGIDIKRDSLSSHNQFGILALSWNIPELVNMGQWKIRAHYEDAPQQVFSAEFEVKEYVLPSFEVQVEPSEKFYYIDDPNGLTVNIIARFLYGESVDGTAFVIFGVQDGDQRISLSQSLTRVPIIDGTGEATLSQGVLLNGVHYSSVNDLVGKSIYVSVTVILNSGSDMVEAERTGIPIVTSPYQIHFTKTPKFFKPAMPFDLMVYVTNPDGSPARHIPVVTEDFKVRSLTQEDGVAKLSINTPDNRNSLPITVRTEKDGIPAARQASKTMHVLPYNTQGNSKNYLHLSLPRVELKPGENLNVNFHLRTDPGYQDKIRYFTYLIMNKGKLLKVGRQPRESGQVVVVLPLTITTDFIPSFRLVAYYTLIAANGQREVVADSVWVDVKDSCVGTLVVKGGGKQDKQHRPGQQMTLEIQGERGARVGLVAVDKGVFVLNKKNKLTQRRIWDVVEKADIGCTPGSGKDFAGVFTDAGLAFKSSKGLQTPQRADLECPKPAARKRRSVQLMEKRMDKLGQYSKDVRRCCEHGMRDNPMKFSCQRRAQFIQHGDACVKAFLDCCEYIAKLRQQHSRNKPLGLARSDLDEEIIPEEDIISRSQFPESWLWTIEEFKEPDKNGISTKTMNVFLKDSITTWEILAVSLSDKKGICVADPYEVVVKQDFFIDLRLPYSVVRNEQVEIRAILYNYREAEDLKVRVELLYNPAFCSLATAKKRHQQTLTVPAKSSVPVPYIIVPLKTGLQEVEVKAAVYNHFISDGVKKTLKVVPEGMRVNKTVVTRTLDPEHKGQQGVQREEIPPADLSDQVPDTESETKILLQGTPVAQMVEDAIDGDRLKHLIQTPSGCGEQNMIGMTPTVIAVHYLDSTEQWEKFGLEKRQEALELIKKGYTQQLAFRQKNSAFAAFQDRLSSTLLTAYVVKVFAMAANLIAIDSQVLCGAVKWLILEKQKPDGVFEENGPVIHQEMIGGFKNTEEKDVSLTAFVLIALQEAKDICEPQVNSLLRSINKARDFLADYYLELKRPYTVAIAGYALALSDKLDEPFLNKLLSTAKERNRWEEPGQKLHNVEATSYALLALLVVKDFDSVPPIVRWLNEQRYYGGGYGSTQATFMVFQALAQYQKDVPDHKDLNLDVSIHLPSRSAPVRHRILWESASLLRSEETKENEGFTLIAEGKGQGTLSVVTMYHGKAKGKTTCKKFDLKVSIHPAPEPVKKPQEAKSSMVLDICTRYLGNQDATMSILDISMMTGFSPDTEDLKLLSTGVDRYISKYELNKALSNKNTLIIYLDKISHTLEDCISFKVHQYFNVGLIQPGSVKVYSYYNLDESCTRFYHPEKEDGMLNKLCHKEMCRCAEENCFMHHDEEEVTLDDRLERACEPGVDYVYKTRLLKKELSDDFDDYIMVIEQIIKSGSDEVQVGQERRFISHIKCREALKLKEGGHYLVWGVSSDLWGEKPNISYIIGKDTWVELWPDGDVCQDEENQKQCQDLANFSENMVVFGCPN

SEQ ID NO: 386 - protein, 105 aa, Sus scrofa
QPKAAPTVNLFPPSSEELGTNKATLVCLISDFYPGAVTVTWKAGGTTVTQGVETTKPSKQSNNKYAASSYLALSASDWKSSSGFTCQVTHEGTIVEKTVTPSECA

SEQ ID NO: 387 - protein, 141 aa, Sus scrofa
VLSAADKANVKAAWGKVGGQAGAHGAEALERMFLGFPTTKTYFPHFNLSHGSDQVKAHGQKVADALTKAVGHLDDLPGALSALSDLHAHKLRVDPVNFKLLSHCLLVTLAAHHPDDFNPSVHASLDKFLANVSTVLTSKYR

SEQ ID NO: 388 - protein, 337 aa, Sus scrofa
AVSASPVLTLPNDIQVQENFDLSRIYGKWFHVAVGSTCPWLKRFKDKMTMGTLMLGEGATEREISVTKTHRRKGICEVISGAYEKTSTDGKFLYHKSKWNITMESYVVHTNYDEYAIFLTKKFSRRHGPTLTAKLYGREPQLRESLLEEFREVALGVGIPEDSIFTMPDRGECVPGEQEPEPTLLSRARRAVLPQEEEGSGAGQPVADFSKKEDSCQLGYSQGPCLGMIKRYFYNGSSMACETFHYGGCMGNGNNFVSEKECLQTCRTVEACSLPIVSGPCRGFFQLWAFDAVQGKCVLFNYGGCQGNGNQFYSEKECKEYCGVPGEEDEELLRSSN

SEQ ID NO: 389 - protein, 809 aa, Sus scrofa
MDHKEVVLLLLLFLKSGLGDSLDDYVNTQGAFLFSLSRKQVAARSVEECAAKCEAETNFICRAFQYHSKDQQCVVMAENSKTSPIARMRDVVLFEKRIYLSECKTGNGKNYRGTTSKTKSGVICQKWSVSSPHIPKYSPEKFPLAGLEENYCRNPDNDEKGPWCYTTDPETRFDYCDIPECEDECMHCSGEHYEGKISKTMSGIECQSWGSQSPHAHGYLPSKFPNKNLKMNYCRNPDGEPRPWCFTTDPNKRWEFCDIPRCTTPPPTSGPTYQCLKGRGENYRGTVSVTASGHTCQRWSAQSPHKHNRTPENFPCKNLEENYCRNPDGETAPWCYTTDSEVRWDYCKIPSCGSSTTSTEYLDAPVPPEQTPVAQDCYRGNGESYRGTSSTTITGRKCQSWVSMTPHRHEKTPGNFPNAGLTMNYCRNPDADKSPWCYTTDPRVRWEYCNLKKCSETEQQVTNFPAIAQVPSVEDLSEDCMFGNGKRYRGKRATTVAGVPCQEWAAQEPHRHSIFTPETNPRAGLEKNYCRNPDGDDNGPWCYTTNPQKLFDYCDVPQCVTSSFDCGKPKVEPKKCPARVVGGCVSIPHSWPWQISLRHRYGGHFCGGTLISPEWVLTAKHCLEKSSSPSSYKVILGAHEEYHLGEGVQEIDVSKLFKEPSEADIALLKLSSPAIITDKVIPACLPTPNYVVADRTACYITGWGETKGTYGAGLLKEARLPVIENKVCNRYEYLGGKVSPNELCAGHLAGGIDSCQGDSGGPLVCFEKDKYILQGVTSWGLGCALPNKPGVYVRVSRFVTWIEEIMRRN

SEQ ID NO: 390 - protein, 696 aa, Sus scrofa
VAQKTVRWCTISNQEANKCSSFRENMSKAVKNGPLVSCVKKSSYLDCIKAIRDKEADAVTLDAGLVFEAGLAPYNLKPVVAEFYGQKDNPQTHYYAVAVVKKGSNFQWNQLQGKRSCHTGLGRSAGWIIPMGLLYDQLPEPRKPIEKAVASFFSSSCVPCADPVNFPKLCQQCAGKGAEKCACSNHEPYFGYAGAFNCLKEDAGDVAFVKHSTVLENLPDKADRDQYELLCRDNTRRPVDDYENCYLAQVPSHAVVARSVDGQEDSIWELLNQAQEHFGRDKSPDFQLFSSSHGKDLLFKDSANGFLKIPSKMDSSLYLGYQYVTALRNLREEISPDSSKNECKKVRWCAIGHEETQKCDAWSINSGGKIECVSAENTEDCIAKIVKGEADAMSLDGGYIYIAGKCGLVPVLAENYKTEGENCVNTPEKGYLAVAVVKKSSGPDLNWNNLKGKKSCHTAVDRTAGWNIPMGLLYNKINSCKFDQFFGEGCAPGSQRNSSLCALCIGSERAPGRECLANNHERYYGYTGAFRCLVEKGDVAFVKDQVVQQNTDGKNKDDWAKDLKQMDFELLCQNGAREPVDNAENCHLARAPNHAVVARDDKVTCVAEELLKQQAQFGRHVTDCSSSFCMFKSNTKDLLFRDDTQCLARVGKTTYESYLGADYITAVANLRKCSTSKLLEACTFHSAKNPRVETTT

SEQ ID NO: 391 - protein, 128 aa, Sus scrofa
KVYDRCEFARILKKSGMDGYRGVSLANWVCLAKWESDFNTKAINRNVGSTDYGIFQINSRYWCNDGKTPKAVNACHISCKVLLDDDLSQDIECAKRVVRDPQGIKAWVAWRTHCQNKDVSQYIRGCKL

SEQ ID NO: 392 - protein, 704 aa, Sus scrofa
MKLFIPALLFLGTLGLCLAAPKKGVRWCVISTAEYSKCRQWQSKIRRTNPMFCIRRASPTDCIRAIAAKRADAVTLDGGLVFEADQYKLRPVAAEIYGTEENPQTYYYAVAVVKKGFNFQLNQLQGRKSCHTGLGRSAGWNIPIGLLRRFLDWAGPPEPLQKAVAKFFSQSCVPCADGNAYPNLCQLCIGKGKDKCACSSQEPYFGYSGAFNCLHKGIGDVAFVKESTVFENLPQKADRDKYELLCPDNTRKPVEAFRECHLARVPSHAVVARSVNGKENSIWELLYQSQKKFGKSNPQEFQLFGSPGQQKDLLFRDATIGFLKIPSKIDSKLYLGLPYLTAIQGLRETAAEVEARQAKVVWCAVGPEELRKCRQWSSQSSQNLNCSLASTTEDCIVQVLKGEADAMSLDGGFIYTAGKCGLVPVLAENQKSRQSSSSDCVHRPTQGYFAVAVVRKANGGITWNSVRGTKSCHTAVDRTAGWNIPMGLLVNQTGSCKFDEFFSQSCAPGSQPGSNLCALCVGNDQGVDKCVPNSNERYYGYTGAFRCLAENAGDVAFVKDVTVLDNTNGQNTEEWARELRSDDFELLCLDGTRKPVTEAQNCHLAVAPSHAVVSRKEKAAQVEQVLLTEQAQFGRYGKDCPDKFCLFRSETKNLLFNDNTEVLAQLQGKTTYEKYLGSEYVTAIANLKQCSVSPLLEACAFMMR

SEQ ID NO: 393 - protein, 409 aa, Sus scrofa
YNSGKLEESFVRGNLERECIEEKCSFEEAREVFENTEKTNEFWKQYVDGDQCEPNPCLNGGLCKDDINSYECWCQVGFEGKNCELDATCNIKNGRCKQFCKTGADSKVLCSCTTGYRLAPDQKSCKPAVPFPCGRVSVSHSPTTLTRAEIIFSNMDYENSTEVEPILDSLTESNQSSDDFIRIVGGENAKPGQFPWQVLLNGKIDAFCGGSIINEKWVVTAAHCIEPGVKITVVAGEYNTEETEPTEQRRNVIRAIPHHSYNATVNKYSHDIALLELDEPLTLNSYVTPICIADKEYTNIFLKFGSGYVSGWGRVFNRGRSATILQYLKVPLVDRATCLRSTKVTIYSNMFCAGFHEGGKDSCLGDSGGPHVTEVEGTSFLTGIISWGEECAVKGKYGIYTKVSRYVNW

SEQ ID NO: 394 - protein, 293 aa, Sus scrofa
MQRARPALWAAALIALALLRGPPAARAGSGAAGTGPVVRCEPCDARALAQCAPPPAAPPCAELVREPGCGCCLTCALREGQACGVYTERCGAGLRCQPPPGEPRPLQALLDGRGICANASAAGRLRAYLLPAPPAPGNGSESEEDRSVDSMENQALPSTHRVPDSKLHSVHTKMDVIKKGHAKDSQRYKVDYESQSTDTQNFSSESKRETEYGPCRREMEDTLNHLKFLNMLSPRGIHIPNCDKKGFYKKKQCRPSKGRKRGFCWCVDKYGQPLPGFDVKGKGDVHCYSMESK

SEQ ID NO: 395 - protein, 772 aa, Sus scrofa
LGALVVALCALSPPARAATASRGAPQARAPQGRVSPMRPSTMVVEHPEFLKAGKEPGLQIWRVEKFDLVPVPPNLYGDFFTGDAYVILKTVQLRNGNLQYDLHYWLGNECSQDESGAAAIFTVQLDDYLNGRAVQHREVQGFESATFLGYFKSGLKYKKGGVASGFKHVVPNEVAVQRLFQVKGRRVVRATEVPVSWESFNRGDCFILDLGNDIYQWCGSNSNRYERLKATQVSKGIRDNERSGRAHVHVSEEDAEPAGMLQVLGPKPTLPEGTEDTVKEDAANRKLAKLYKVSNGAGTMTVSLVADENPFAQGALKSEDCFILDHGKDGKIFVWKGKQANTEERKAALKTASDFISKMNYPKQTQVSVLPEGGETPLFKQFFKNWRDPDQVDGPGLSYLSSHIANVERVPFDAATLHTSTAMAAQHGMDDDGTGQKQIWRIEGSNKVPVDPATYGQFYGGDSYIILYNYRHGGRQGQIIYNWQGAQSTQDEVAASAILTAQLDEELGGTPVQSRVVQGKEPAHLMSLFGGKPMIIYRGGTSREGGQTAPASTRLFQVRASSSGATRAVEVIPKAGALNSNDAFVLKTPSAAYLWVGTGASEAEKTGAQELLRVLRAQPVQVAEGSEPDSFWEALGGKAAYRTSPRLKDKKMDAHPPRLFACSNKIGRFVVEEVPGELMQEDLATDDVMLLDTWDQVFVWVGKDSQEEEKTEALTSAKRYIETDPANRDRRTPINVVKQGFEPPSFVGWFLGWDDNYWSVDPLDRAIAELAA

SEQ ID NO: 396 - protein, 181 aa, Sus scrofa
MGIPMRKPLLVLLVFLALASCCYAAYRPSETLCGGELVDTLQFVCGDRGFYFSRPASRVNRRSRGIVEECCFRSCDLALLETYCATPAKSERDVSTPPTVLPDNFPRYPVGKFFRYDTWKQSAQRLRRGLPALLRARRGRTLAKELEAVREAKRHRPLTARPTRDPAAHGGASPEASGHRK

SEQ ID NO: 397 - protein, 316 aa, Sus scrofa
MLPRLGGTALSLLPLLLLLLGTGGRGARAEVLFRCPPCTPESLAACRPPPAAPPSAGAGPAGDSRAPCELVREPGCGCCSVCARLEGERCGVYTPRCAQGLRCYPHPGSELPLQALVLGEGTCEKRRDAEYGASPEQVADNGDDAEGGLVENHVDGNVNLLGGTGGAGRKPLKSGMKELAVFREKVTEQHRQMGKGGKHHLGLEEPKKLRPPPARTPCQQELDQVLERISTMRLPDERGPLEHLYSLHIPNCDKHGLYNLKQCKMSLNGQRGECWCVNPNTGKLIQGAPTIRGDPECHLFYNEQQGARGAHTQRMQ

SEQ ID NO: 398 - protein, 96 aa, Sus scrofa
MQPRVLLVAGLLVLLACAQAIEAEDTSLLDKMQDYVKQATRTAQDALTSVKESEVAQQARGWVTDSISSLKDYWSTFKGKFTDFWDYTPKPEPSSS

SEQ ID NO: 399 - protein, 123 aa, Sus scrofa
KDEDRYTHFLTQHYDAKPKGRDGRYCESIMKQRGLTRPCKEVNTFIHGTRNDIKAICNDKNGEPYNNFRRSKSPFQITTCKHKGGSNRPPCGYRATAGFRTIAVACENGLPVHFDESFIITSQ

SEQ ID NO: 400 - protein, 848 aa, Sus scrofa
MTLHCVVALFALISSCLATAGPEPGVQCALSPVNASHPVQALMESFTVLSGCASRGTMGRPQEVHVLNLRAADQGPGQRQSEVTLHLNPISSVHIHHKPVVFLLNSPQPLVWHLKTERLAVGVSRLFLVSEGSVVHFSSGNFSLSAETEERNFPHGNEHLLNWARKEYGAVTSFTELKIARNIYIKVGEDQVFPPTCSIGKNFLSLNYLAEYLQPKPAEGCVVSGRPQEKEVHIIELIAPNSNPYSAFQVDIIIDIRPSRKDPELVKNLILILKCKKSVNWVIKSFDVKGNLKVLAPNSIGFGRESERSMIMTKSVRDDIPSTQEKLLRWALDNGYSPVTSYTVAPVANRFHLRLENNEEMRDEEVHTIPPELQILLDPGALPVLDHPPSGEGAARHGGLPFPFPYIPRRGRQDGGKDRLPRPKDPVVPSIQLLPGPREPQEAQGSRDVALSVRCDSEKMLVAVEKDSFQASGYPGLELTLLDPTCKAKTNGTHFILESPLDGCGTRHRRSAPDGVVYYNSIVIQAPPSGDSSGWPDGYEDLESGDNGFPGDVDEGDVALSSRPELVVFNCSLRPARHPSRAQDPPTRNVTFSMDLYTTDLFLAPAQGVFSVAENGHVYVEVSVTKADQELGFAIQTCFISPYSNPDRMSDYTIIENICPKDESVKFYDPKRVHFPIPQAETDKKRFSFVFKPVFNTSLLFLQCELTLCTKREKEPQKLPKCVLPDEACTSLDASMIWAMMQNKKTFTKPLAVIHHEVQFKGPSTKESNPISPPIFHGLDTLTVMGIAFAAFVIGALLTGALWYIYSHTGDSAGRQPVPTSPPASENSSAAHSLGSTQSTPCSSSSAA

SEQ ID NO: 401 - protein, 119 aa, Sus scrofa
MSLRLGAISSCTTSSPFPVLQVLLPLSLLLTTLVPATMGAAKIEGRMAHVELRCLCLNTVSGIHPSNIQSLEVIRAGAHCAKVEVIATLKNDKKICLDPEAPRIKKIVQKIMEDGGSAA

SEQ ID NO: 402 - protein, 459 aa, Sus scrofa
MAPLRPLLMLALLAWVALADQESCKGRCTDGFIAERKCQCDELCSYYQSCCTDYVAECKPQVTRGDVFLQPDDEYRAYDYHEETRHNTSVQEEQRIPVLLAKTEETPVLKPEEEAPPPGPQTDDLGVPEEELCSGKPFDAFTNLKNGSVFAFRGLYCYELDEKAVRPGYPKLIQDVWGIKGPIDAAFTRINCQGKTYLFKGSQYWRFDDGVLDPNYPREISEGFKGIPDDVDAALALPAHSYSGRERVYFFKGKQYWEYVFQQQPSREECEGSSPSDVFAHFALMQRDSWEDIFRLLFWSHSFGGAIEPRVISQDWLGLPEQVDAAMAGQIYISGSALKPSQPKMTKSARRSGKRYRSRRGRGRGRGHSRSQKSHRQSRSTWLPWFSSEETGPGGYNYDDYKMDWLVPATCEPIQSVYFFSGEEYYRVNLRTQRVDTVTPPYPRSIAQYWLGCPVPDQK

SEQ ID NO: 403 - protein, 459 aa, Sus scrofa
MARALGTVEAPWLLGLCCSLAIAHPLSLTAGPKHGAEGRNESKPDPDVTERCSDGWGFDASTLDEHGAMLFFKGPSVWAGQNWTRGLISERWKNAPSSVDAAFRRGHDRVFLIQGDKVWVYPPEKEKENPRSLQEEFPGVPSPLDAAVECHRGECQDEGVLFFQGTHTWFWDSTTKTTKERLWPAVGNCSSAMRWISRYYCFRGNQFLRFDPVTGHVDPKYPRDVRDYFMSCPGRGHAHRNATHRGDDRCSPDLVLTALLSDNHGATYAFRGTHYWRLDTSRDGWHSWPIDHQWSHGPSAVDAAFSWDDKLYLIQGTQVYIFLTKAGYTLVDNYPKQLEKELGSPHGISLDAVDATFVCPGTSRLHVMAGRKLWWLDLSLGAQGPWTELPWPHEKVDAALCTEKSLGPNSCSASGLGLYIVHGPHVYCYKDVEKLVSAKALPQPQSVNSLLGCHRSRGS

SEQ ID NO: 404 - protein, 259 aa, Sus scrofa
MADRSGHLAALILLGAAVCVAQPRGRILGGQEAKSHERPYMASVQVNGKHVCGGFLVSEQWVLSAAHCLEDVAEGKLQVLLGAHSLSQPEPSKRLYDVLRAVPHPDSQPDTIDHDLLLLKLSEKAELGPAVQPLAWQREDHEVPAGTLCDVAGWGVVSHTGRRPDRLQHLLLPVLDRTTCNLRTYHDGTITERMMCAESNRRDSCKGDSGGPLVCGGVAEGVVTSGSRVCGNRKKPGIYTRLASYVAWIDGVMADSAAA

SEQ ID NO: 405 - protein, 248 aa, Sus scrofa; identical to SEQ ID NO: 132

SEQ ID NO: 406 - protein, 921 aa, Sus scrofa
MKTLSPTGYGLLLVLPLLLAVLQSTTAHKNDINIYSLTVDSKVSSRFAHTVVTSRVVNKGSAVQEATFQMELPKKAFITNFSMIIDGVTYPGNIKEKAAAQEQYSAVARGESAGLVRATGRKTEQFQVAVSVAPAAKVTFELVYEELLARHLGVYELLLKIQPQQLVKHLQMDIHIFEPQGISFLETESTFMTNELAEALTISQNKTKAHIRFKPTLSQQQKSPEQQETVLDGNFIVRYDVNRTVTGGSIQIENGYFVHYFAPEVWSAIPKNVIFVIDTSGSMRGRKIQQTREALIKILGDLGSRDQFNLVSFSGEAPRRRAVAASAENVEEAKSYAAEIHAQGGTNINDAMLMAVQLLERANREELLPARSVTFIILLTDGDPTVGETNPSKIQKNVREAIDGQHSLFCLGFGFDVPYAFLEKMALENGGLARRIYEDSDSALQLEDFYQEVANPLLRLVAFEYPSNAVEEVTQDNFRLFFKGSELVVAGKLRDQSPDVLSAKVRGQLHMENVTFVMESRVAEQEAEFLSPKYIFHSFMERLWAYLTIQQLLAQTVSASDAEKKALEARALSLSLNYSFVTPLTSMVITKPEGQEQSQVAEKPVENGNRQGNTHSGHSSFQFHSVGDRTSRLTGGSSVDPVFSHRRGWKGQAQGFEKMSYLPPRLGPPGPLQPTRFSHPFSRITLDRVLPEVLSVPDETSHDMDSRIIGATIPPPPARIQAPSVILPLPGQSVDQLCVDLKHSQGPVKLLSDPGQGVEVTGHYEREKARFSWIEVTFKHPPLQVRASLEHIVVIRNRQSSAYKWKETLYSVMPGLKITMDKAGLLLLSSPNRVTIGLLSWDGPGKGLRLLLRDTDHFSSQISGTFGQFYQDVVWGPPAAADDSKRTVTVQGHDHSATRELKLDYQEGSPGKEISCWTVVL

SEQ ID NO: 407 - protein, 202 aa, Sus scrofa
MPPNLQRIFPALCLLGVLFLLHCTPVLCGCDNPPVVAHGHHTQIIGLFGMKKDEVVYKCDEGYTLVGEDRLSCRSSRWSPAAPQCKALCPKPQIDRGKLSVDQDEYIESENVIVQCGSGYGLVGPKIITCTEDGTWHPRVPKCEWEYPEDCEQVHEGKKLMQCLPNLEEIKLALELYKLSLETKLLELQIDKEKKAKAKYSI

SEQ ID NO: 408 - protein, 118 aa, Sus scrofa
MAPLVALVLLGLLSLSGLDAVARPPKVQVYSRHPAENGKPNYLNCYVSGFHPPQIEIDLLKNGEKMNAEQSDLSFSKDWSFYLLVHTEFTPNAVDQYSCRVKHVTLDKPKIVKWDRDH

SEQ ID NO: 409 - protein, 146 aa, Sus scrofa
MAGSPRSPLLLLAALALALALAVSPAAGQGHKGRLVGGLIDADVNEEGVQQALSFALSEYNKASNDAYHGRVLRVLRVRKQVVAGMNYFLEVEIGRTTCTKSQANLDNCPFPNQPDLQKKTLCSFQVYTVPWKGTTSLVKSSCRDE

SEQ ID NO: 410 - protein, 606 aa, Sus scrofa
MALRKGGRALAALLVSWAALGPCTLAGTEPGAPSDAEGLPCPAACSCGHDDYTDELSVFCSSRNLTQLPDGIPDAARALWLDSNNFSSVPAGAFRNLSSLGFLNLQGSGLASLEPQALLGLQNLYHLHLERNQLRSLAAHTFLHTPGLASLGLHNNLLSRVEEGLFQGLTNLWDLNLGWNSLAVLPDTAFHGLANLRELVLAGNKLTYLQPALFCGLGELRELDLSRNALRSVKANVFVKLPKLQKLYLDHNLLAAVAPGAFLGMKALRWLDLSHNRVGGLLEDTFPGLLGLHVLRLAHNALASLRPRTFKDLHFLEELQLGHNRLRQLPEKAFEGLGQLEVLALNDNQIQEIKAGAFLGLFNVAVMNLSGNCLRNLPEQVFRGLGKLHSLHLEHSCLGRVGLHTFAGLSGLRRLFLKDNGLEAIDEQSLWGLAELLELDLTANRLTHLPGRLFQGLGKLEYLLLSRNRLSALPADALGPLQRTFWLDVSHNRLQALPEAVLAPLGQLRYLSLRNNSLRTFVPQPLGLERLWLEGNPWDCGCPLRALRALALQHPAVVPRFVRAVAEGDDDRQPPAYAYNNITCASPPAVSGLDLRDLSEAHFAHC

SEQ ID NO: 411 - protein, 2482 aa, Sus scrofa
DGCSCPEGQLLDDGRCVESAECSCVHSGKRYPPGASLSRDCNTCICRNSLWVCSNEDCPGECLVTGQSHFKSFDNRHFTFSGVCQYLLARDCQDHTFSVIIETVQCADDPDAVCTRSVTVRLPSPHNSLVKLKHGGGVAMDGWDVQIPFLQGDLRIQHTVMASVHLSYGEDLQIDWDGRGRLLVKLSPVYAGRTCGLCGNYNGNQGDDFLTPAGLVEPLVEHFGNAWKLHGDCEDLRKQPTDPCSFNPRLTRFAEEACAILTSPKFQACHDAVGPLPYLQNCHYDVCSCSDGRDCLCDAVATYAAACARRGVHIGWREPGFCALSCPPGQVYLQCGTPCNLTCRSLSYPDEECAEDCLEGCFCPPGLYLDGSGDCVPKAQCPCYHDGEIFQPEDIFSDHHTMCYCEDGFMHCSRAGAPGSLQPEVVLSSPLSHRSKRSLSCRPPMVKLVCPADNPRAEGLECAKTCQNYDLECVSTGCVSGCLCPPGMVRHENRCVALQRCPCFHQGREYAPGETVKVDCNTCVCRDRKWSCTDHVCDASCSALGLAHYLTFDGLKYLFPGECQYVLVQDYCGSNPGTFRILLGNEGCGYPSLKCRKRVTILVDGGEIELFDGEVMVKKPLKDETHFEVVESGRFITVLLGSGLSVVWDRHLGISVFLKQTYQEQVCGLCGNFDGVQNNDLTGSSLQVEEDPVDFGNSWKVSPQCADTRKVPLDTSPATCHNNVMKQTMVDSSCRILTSDIFQDCNKLVDPEPYLDVCIYDTCSCESIGDCACFCDTIAAYARVCAQHGKVVTWRTATLCPQNCEERNLREDGYQCEWRYNSCAPACPVTCQHPEPLACPVSCVEGCHAHCPPGKILDELLQTCVSPEDCPVCEAAGRRLAPGKKIILNPRDPAHCQICHCDGVNLTCEACAEPVPPTEGPVSPTTPYEEDTPEPPLHDFFCSKLLDLVFLLDGSDKLSEADFEALKVFVVGMMEHLHISQKHIRVAVVEYHDGPHAYISLQDRKRPSELRRIASQVKYAGSEVASISEVLKYTLFQIFGRVDRPEASRIALLLMASQEPRRLAQNLARYLQGLKKKKVTVIPVGIGPHVSLKQIRLIEKQAPENKAFVVSGVDELEQRKNEIISYLCDLAPEVPAPTRRPLVAQVTVAPELPGVSTLEPKKRMALDVVFVLEGSDKVGEANFNRSTEFVEEVIRRMDVGRDSVHVTVLQYSYVVAVEHSFREAQSKGEVLQRVREIRFQGGNRTNTGLALQYLSEHSFSASQGDREEAPNLVYMVTGNPASDEIKRMPGDIQVVPIGVGPDVDMQELERLSWPNAPIFIQDFETLPREAPDLVLQRCCSGEGPHLPTQAPVPDCSQPLGVVLLLDGSSSLPASYFDEMKSFTKAFISKANIGPQLTQVSVLQYGSITTIDLPWNMPLEKAHLRGLVDLMQREGGPSQIGDALGFAVRYVMSQVHGARPEASKAVVIVVTDTSTDSVDAAAAAARSNRVAVFPIGIGDRYDEAQLRTLAGPGASSNVVKLQRIEDLPTLVTLGNSFLHKLCSGFVRVCIDEDGSERKPGDVWTLPDQCHTVTCLPDGQTLLKSHRVNCDQGLQPSCPSNQPPIRVEEACGCRWTCPCVCTGSSTRHIVTFDGQNFKLMGNCSYVLFHNKEQDLEVILHNGACGAGARQACMKSIEVKHNGLSVELHRDMEVVVNGRQVSVPYVGGNMEVGIYGTIMYEVRFNHLGHILTFTPQNNEFQLQLSPKTFASKMYGLCGICDENGANDFMLRDGTVTTDWKTMVQEWAVQQPGQMCQPVPKEQCPVSGGYQCQVLLSALFAECHKVLAPAAYFAICQQDSCHQEQVCEAVASYAHLCRTKGVCVDWRTPDFCAVSCPPSLVYNHCEHGCPRHCEGNSSSCGDHPSEGCFCPPHQVMLGSSCVPEEACTQCVDDDGIRHQFLETWVPDHQPCQICTCLSGRRVNCTLQPCPTARAPACGLCEVARLRQEAHQCCPEYECVCDLVSCDLPPVPHCEGGLQPTLTNPGECRPNFTCACRKEECPRGPLPSCPPHRTPALRKTQCCDEYECACNCVNTTLSCPLGYLASTVTNDCGCTTTTCLPDKVCVHRGTVYPVGQFWEEGCDVCTCTDLEDAVMGLRVAQCAQKPCEDSCRPGFTYVLHEGECCGKCLPSACKVVIGSFRGDSVSYWKSVGSHWASPENPCLINECVRVKEEVFVQQRNVSCPMLDVPTCPVGFQLSCKTSGCCPTCRCEPVEACLLNGTIIGAGESLMIDVCTTCRCMLQEGVVFGFKLECKKTTCEACPLGYKEEKMPGECCGRCLPTACTIQLRGGQIMTLKRDETLQDGCDSHFCRVNERGEYIWEKRITGCPPFDQHKCLAAGGKIMKIPGTCCDTCEEPECKDMTARLQYVKVGNCRSEEEVDIHYCQGKCTSKAVYSIDTEDVEDQCACCSPTRTEPMQVPLRCTNGSTIYHEVLNAIQCKCSPRKCSK

SEQ ID NO: 412 - protein, 334 aa, Sus scrofa
MKPSLFLTALCLGIASAAPKLDQNLDADWYKWKATHGRLYGMNEEGWRRAVWEKNMKMIELHNQEYSQGKHGFSMAMNAFGDMTNEEFRQVMNGFQNQKHKKGKVFHESLVLEVPKSVDWREKGYVTAVKNQGQCGSCWAFSATGALEGQMFRKTGKLVSLSEQNLVDCSRPQGNQGCNGGLMDNAFQYVKDNGGLDTEESYPYLGRETNSCTYKPECSAANDTGFVDIPQREKALMKAVATVGPISVAIDAGHSSFQFYKSGIYYDPDCSSKDLDHGVLVVGYGFEGTDSNSSKFWIVKNSWGPEWGWNGYVKMAKDQNNHCGISTAASYPTV

SEQ ID NO: 413 - protein, 902 aa, Sus scrofa
MDGTMGLQGLLCLCLASHLALQAMPTQGSPTDSTKGNKAVNGVVIRSLKVNCKVTSRFAHYVVTSQVVNNTNKPKEVAFDVEIPKTAFISDFAITADENTFVGDIKDKVTAWKQYRKAAISGENSGLVRASGRTMEQFTIHVTIGPRSKATFQLTYEEVLRRKLTQYDIVIKVKPKQLVQHFEIDVDIFEPQGISKLDAQASFLSKEAAAQLIKKSFSGKKGHVLFRPTVGQQQSCSTCSTTLLNGDFKVTYDVNREKLCDLLVANNYFAHFFAPQNLTKLNKNVVFVIDISSSMEGQKVKQTKEALLKILSDLKPGDYFDLVLFGSAVQSWRGSLVQASTANLDAARSYVRQFSLAGSTNLNGGLLRGIEILNKAQGSLPEFSNRASILIMLTDGEPTEGVTDRSQILKNVRDAIRGRFPLYNLGFGHDVEWNFLEVRALENNGRAQRIYEDHDSAQQLQGFYDQVANPLLKDVELQYPADAVLALTQHRHKQYYEGSEITVAGRIADNKLSSFKADVQASGDQGFKTTCLVDEEEMKKLLQERGHMLENYVERLWAYLTIQELLAKRMKLEWAEKASVSAKALQMSLDYQFVTPLTSMTIRGMADKDGLEPVIDKPLEDSQPLEMLGPRRKFVLSASQPSPTHPSSSIQKLPDRVTGVDTDPHFIIRVPQKEDTLCFNINEEPGVVLSLVQDPDTGFSVNGQLIGNEARCPGKHEGTYFGRLGIANPATGFQLEVTPQNITLNPGSGGPVFSWRDQASLRQDEVVVTINRKRNLGVVREDGGTFEVVLHRLWKGSAIHQDFLGFYVLDSHRMSARTHGLLAQFFHPFDYKVSDIHPGSDPTKTDATMVVKNRQLTVTRGLQKDYSKDPRHGLKVTCWFIHNNGDGLIDGVHTDYIVPDIF

SEQ ID NO: 414 - protein, 704 aa, Sus scrofa
MRLAFCVLLCAGSLGLCLAFPKETVRWCTVSSQEASKCSSFRHNMKKILPVEGPHVSCVKRTSYLECIRAILANEADAVTIDGGLVFEAGLAPYNLKPVVAEFYGSKDDPQTHYYAVAVVKKGSDFQLSQLRGKKSCHTGLGWSAGWNIPMGILLPPDSGEEAAAKFFSSSCVPCADRMAFPKMCQLCAGKGVEKCACSNHERYFGYSGAFKCLQEDVGDVAFVRHVTVFENLPDKADRDQYELLCKDNTRRPVDDYENCYLAQVPSHAVVARSVDGKEDLIWELLNQAQENFGKDKSAEFQLFSSSHGKDLLFTDACLGFLRVPPKMDAKLYLGYEYFAAIQHLRRVQGTEEPQRVMWCAVGQHERTKCDSWSVLSGGILNCNSEDTMEDCIAAIAKGEADAMSLDGGFLYTAGKCGLVPVLAENYLSQDGKERFGSKCVNTPVEGYYVVAVVKKSDADLTWNSLRGKKSCHIAVGTSAGWIIPMGFIYNQTGSCKLDEFFSQSCAPGSDPESRLCALCSGSISGQPAHTCAPNSHEGYHGFSGALRCLVEKGDVAFVKHPTVLQNTDGRNPEAWAKDLKQEDFQLLCPDGTRKPVTEAQSCHLAAVPSHAVVSRKDKADFVRRMLFNQQELFGRNGFEYMMFQLFKSSTEDLLFSDDTECLANLQDKITYQKYLGPEYLQAIANVRQCFPSELLDACTFHGN

SEQ ID NO: 415 - protein, 446 aa, Sus scrofa
MKTLLLLVGLLLTWENGPWVLGDKAISDKELQEMSTEGSKYVNKEIKNALKEVKQIKTLIEQSNEERKSLLSSLEEAKKKKEDALNDTRDTETKLKGSQGLCNETMMALWEECKPCLKQTCMKFYARVCRSGSGLVGHQLEEFLNQSSPFYFWINGDRIDSLMENDRQQSHVMDIMEDSFNRASNIMDELFQDRFFNREPFDTQFFSPFGSSHRGSLFFNPKSRFARNIMPFPLFTDLNYHDMFQPFFDMIHQAQQAMDAHLHRIPYHFPEAGVPENSNDRAVCKEIRHNSTGCLRMKDQCEKCREILSVDCSASNSSQMQLRQELYTSLQMAEKFSKLYDQLLQSYQQKMLNTSSLLKQLNEQFSWVSQLANLTQNDDRYYLQVTTVNSHGSDPSVPSGLTKVVVKLFDSYPITLIIPQEVSDPKFMETVAEEALQQYRQRSREE

SEQ ID NO: 416 - protein, 254 aa, Sus scrofa
MIQTELLFCCVLLSSVTAFPRSAQEGALTFQPPFTETGGPLDMLSNQISLPDPKMCQDLLHVVPSLAPLPEYLSNLALEVALEEVGCLTEAHMLELQLVKMGGKDTTETLIRESKKRNEEKGINDGEIMLRGLEGSPGELRRVQRSVTLPEACQQEGRWVLYELAELIGEFAEKLPSTELVRELKTAAVDVTQKCTDESWQHLEAVGNRLMKNPETKDFTMPMDDQIYFVKRSVAILARVILEFIQKYFQEFFG

SEQ ID NO: 417 - protein, 687 aa, Sus scrofa
MWCIVLLSLLAWVDAEPTMYGEILSPNYPQAYPNEVEKSWDIEVPEGYGIHLYFTHLDIELSENCAYDSVQIKSGGREEGKLCGQKTSKNPKSAVVEEFQVPYNKLQVIFTSDFSNEERFTGFAAYYVAVDVNECTDFADSPCSHFCNNYIGGYFCSCPPEYFLHEDKKNCGVNCSGDVFTTLIGEVASPNYPNPYPENSRCDYQILLEEGFQVVVTMRREDFDVEPADSGGHCPDSLIFVAGNQQFGPYCGNGFPGPLTIETKSNALNIIFQTDETEQKKGWKFRYHGDPIPCPKEVTANSFWEPEKAKYVFKDVVKITCLDGFEVVQGTVGSTSFYSTCQSNGKWSNSKLRCQPVDCGSPEPIPHGKVEDPEHTLFGSVTRYSCEQPYYYMETDGSEEYRCAGNGSWVNELLGAELPKCVPVCGIPSEPFKGMQRIFGGIITKIESFPWQVFFQNPRAGGALIDEQWVLTAAHVVEGNREPVMYVGSSSVVTSHLANGQMLTAERVFIHPGWEEQDASERKNFDNDIALVRLKDPVKMGPTVSPICLPGTSSDYDPSVGDLGLISGWGRTNTKDHVVKLRGAKLPVAPSDKCQEIKGTNPRIGTSSFVFTDNMICAGGRGVDSCNGDSGGAFAMQVPNEETPKFYVAGLVSWGPQCGTYGIYTRVKNYIDWIRETMQQNSAPSVD

SEQ ID NO: 418 - protein, 248 aa, Sus scrofa
MAGITTIEAVKRKIQVLQQQADDAEERAERLQREVEGERRAREQAEAEVASLNRRIQLVEEELDRAQERLATALQKLEEAEKAADESERGMKVIENRALKDEEKMELQEIQLKEAKHIAEEADRKYEEVARKLVIIEGDLERTEERAELAESRCREMDEQIRLMDQNLKCLSAAEEKYSQKEDKYEEEIKILTDKLKEAETRAEFAERSVAKLEKTIDDLEDKLKCTKEEHLCTQRMLDQTLLDLNEM

SEQ ID NO: 419 - protein, 704 aa, Sus scrofa
MKLFIPALLFLGTLGLCLAAPKKGVRWCVISTAEYSKCRQWQSKIRRTNPIFCIRRASPTDCIRAIAAKRADAVTLDGGLVFEADQYKLRPVAAEIYGTEENPQTYYYAVAVVKKGFNFQLNQLQGRKSCHTGLGRSAGWNIPIGLLRRFLDWAGPPEPLQKAVAKFFSQSCVPCADGNAYPNLCQLCIGKGKDKCACSSQEPYFGYSGAFNCLHKGIGDVAFVKESTVFENLPQKADRDKYELLCPDNTRKPVEAFRECHLARVPSHAVVARSVNGKENSIWELLYQSQKKFGKSNPQEFQLFGSPGQQKDLLFRDATIGFLKIPSKIDSKLYLGLPYLTAIQGLRETAAEVEARQAKVVWCAVGPEELRKCRQWSSQSSQNLNCSLASTTEDCIVQVLKGEADAMSLDGGFIYTAGKCGLVPVLAENQKSRQSSSSDCVHRPTQGYFAVAVVRKANGGITWNSVRGTKSCHTAVDRTAGWNIPMGLLVNQTGSCKFDEFFSQSCAPGSQPGSNLCALCVGNDQGVDKCVPNSNERYYGYTGAFRCLAENAGDVAFVKDVTVLDNTNGQNTEEWARELRSDDFELLCLDGTRKPVTEAQNCHLAVAPSHAVVSRKEKAAQVEQVLLTEQAQFGRYGKDCPDKFCLFRSETKNLLFNDNTECLAQLQGKTTYEKYLGSEYVTAIANLKQCSVSPLLEACAFMMR

SEQ ID NO: 420 - protein, 204 aa, Sus scrofa
MEKRAMRMLAMFVLGTSFWSCAGFPVYDYDPSSLREAVGASVAKVNSQSLSPYLFRAFRSSLKRVNVLGEDSLSMDIEFGIRETTCKRDSGEDPATCDFQRGYFTPSAICRSTVQISAEKVQDVWVRCRWSSSSESNSSEEMIFGDILGSSTSRNNYLRGLIPDVSRTEPLYERSLETMRRFPPPGNRSFPNQWPRARTNTGFE

SEQ ID NO: 421 - protein, 262 aa, Sus scrofa
MPEVPAVRAWPLLLSLALQLGAAAGAPQPLHCAPCSAERLALCPPVPASCPEATRPAGCGCCPTCALPLGACGVATARCARGLSCRALPGEPRPLHALTRGQGACMPAPSAEATETKDPAAPETTSPESTEMTQEQLLDSFHLMATSSEDLPILWNAINNYESMKALEATDIKKWKEPCQRELYKVLDRLAREQQKAGDRLYKFYLPNCNKNGFYHSKQCETSLEGEPGLCWCVYPWSGKKILGSTAVRGDPKCHQYFNSQN

SEQ ID NO: 422 - protein, 598 aa, Sus scrofa
MSPGNWKTTMVVRGILLILYGLLLQPEPGTATLPLLMDSVIQALAELERKSPATEAGHIASMWLLSAQGSGAHNPLPRFLLEGQSLKTAKLAPPSLSPEFQGLIEEVARHGVQDGKEYGVVLAPDGSTVAVEPLLAGLEAGLQGHRVVNLPLDSTATFPDIGATVPDLKATSSAHKDTSADVNSADVGTLSPNVRDTDVDAEVTFLDVRPSSTGVQVTSPDVQVSSPDTKAKSPTTVDSLLMVTLARDLGLHFLQGAQTESNSGLGTEGCWDQLSLPRTFTLLDPEASPLTMAFLNGALDGALLGDYLSKVPEPRPPLSHLLNQYYGAGVAGDPGLRSNFRRQNGAALTLTPNLTQQVWGTLILLQRLEPAHPQLQGMSQEQLAQVATHAAKEFTEAFLGCPAIHPRCRWGAAPYRGSPKPLKLPLGFLYIHHTYVPARPCTDFALCAANMRSMQRFHLDTQGWDDIGYSFVVGSDGYVYEGRGWHWVGAHTRDHNSRGFGVALIGNYTAELPSEAALRAVRDELPHCAVRAGLLQPDYALLGHRQLVRTDCPGDALFNMLRTWPRFNMNVKPRTARRASGRSKRRLPLMIPLATDLQ

SEQ ID NO: 423 - protein, 347 aa, Sus scrofa
MRALGAVVALLLCGQLFAAETGNEATDATDDSCPKPPEIPKGYVEHMVRYHCQTYYKLRTAGDGVYTLDSNKQWTNKVTGEKLPECEAVCGKPKNPVDQVQRIMGGSLDAKGSFPWQAKMISHHNLTSGATLINEQWLLTTAKNLRLGHKNDTKAKDIAPTLRLYVGKKQEVEIEKVIFHPDNSTVDIGLIKLKQKVPVNERVMPICLPSKDYVNVGLVGYVSGWGRNANLNFTEHLKYVMLPVADQEKCVQYYEGSTVPEKKTPKSPVGVQPILNEHTFCAGLSKYQEDTCYGDAGSAFAVHDKDDDTWYAAGILSFDKSCRTAEYGVYVRVTSILDWIQTTIADN

SEQ ID NO: 424 - protein, 745 aa, Sus scrofa
MEVMNLIEQPIKVTEWQQTYTYDSGIHSGANTCVPSVSSKGLMEEDEACGRQYTLKKTTTYTQAVPQSQGDLEYQMSTTARAKRVREAMCPGVTGEDSSLLLATQVEGQTTNLQRLAEPSQLLKSAIVHLINYQDDAELATRALPELTKLLNDEDPVVVTKAAMIVNQLSKKEASRRALMGSPQLVAAVVRTMQNTSDLDTARCTTSILHNLSHHREGLLAIFKSGGIPALVRMLSSPVESVLFYAITTLHNLLLYQEGAKMAVRLADGLQKMVPLLNKNNPKFLAITTDCLQLLAYGNQESKLIILANGGPQALVQIMRNYSYEKLLWTTSRVLKVLSVCPSNKPAIVEAGGMQALGKHLTSNSPRLVQNCLWTLRNLSDVATKQEGLESVLKILVNQLSVDDVNVLTCATGTLSNLTCNNSKNKTLVTQNSGVEALIHAILRAGDKDDITEPAVCALRHLTSRHPEAEMAQNSVRLNYGIPAIVKLLNQPNQWPLVKATIGLIRNLALCPANHAPLQEASVIPRLVQLLVKAHQDAQRHVAAGTQQPYTDGVRMEEIVEGCTGALHILARDPMNRMEIFRLNTIPLFVQLLYSSVENIQRVAAGVLCELAQDKEAADAIDAEGASSPLMELLHSRNEGTATYAAAVLFRISEDKNPDYRKRVSVELTNSLFKHDPAAWEAAQSMIPINEPYADDMDATYRPMYSSDVPLDPLEMHMDMDGDYPMDTYSDGLRPPYPAADHMLA

SEQ ID NO: 425 - protein, 2258 aa, Sus scrofa
MFPALPCPWVLVVLGTSWAAWGNLGTEAARVRQFYVAAQSISWNYHPEPTHPSSSPFATSFKKIVYREYEAYFQKEKPPSRMSGLLGPTLYADVGDIMKVHFRNKADKPLSIHPQGIKYSKFAEGASYPDHTFLVEKMDDAVAPGQEYTYEWNISEDSGPTHNDPPCLTHIYYSYENLIQDFNSGLIGPLLICKKGTLTEDGIQKMFDKQYVLMFAVFDESKSWNQSSSLMYTVNGYVNGTMPDITVCAYDHISWHLIGMSSGPELFSIHFSGQVLEQNHHKVSAITLVSATSTTANMTVSPEGKWPISSLIPKHFQAGMQAYIDIKNCAKKTRKPKKLTRDQRRHIKRWEYFIAAEEVIWDYAPIIPANMDKKYRSLHLDNFSNQIGKHYKKVVYKQYQDESFTKRLENPNNKEDGILGPVIRAQVRDTLKIVFKNMASRSYSIYPHGVTFSPYEDDVNSSSTSDNNTMIRAVQPGETYTYKWNILESDEPTENDAQCLTRPYYSNVDITRDIASGLIGLLLICKSRSLDKRGIQRTADIEQKAVFAVFDENKSWYIEDNIYKFCENPEKVKRDDPKFYESNIMSTINGYVPESIPTLGFCFDDTVQWHFCSVRTHDNILTIHFTGHSFIYGKRHEDTLTLFPMRGESVTVTMDNVGTWMLTTMNSNPRNKKLQLKFRDVKCIRDDDEDSYEIIYEPSSSTTLTTRKMHDSSENKEEENDDEYDYQDLLASVLGIRSFRNSSLYQEDDEFNLTALALENNSEFIPPSTDRAVDSNSSSPGNISRAPANTFTEPRKILPHPEATKAGSPRRHTGLVKNLVLNRRRTQHSDPYSEDPIENPLQSVITGISLLPFGTEGFRNREHPKHKRFKAGRDQAAKHRFSQMEFPAHKTGRHISQDNSSSSSMGPLEDLSSDLLLLERKDPSTINGKWHLVSEKGSYEIVQDADEDMAVNKLPNNPQNASRSWGENIPFTNKHGKQRGHPIFVTRHKLLQERQDEGNSILKKGRFFIRTRRKKKERKPVHHVPLSPRSFNPLRGEANTPFSDRRQNHSLLLHESNETFPPTDLNQTFPSMNLSLIASHPDHNQNLPNDTHQTSSPLDLYQTVTPDEPYQTAPIQDLDPTHSTAVPSHQSSLPEPIQMHDYDLRNKASPTDVSEMFFSLKLKAGHRTTSPDLNQTSLSPELSQTTLSPDPGHVTLSPDLSQTTLSPDLSHTTLSPDLGHTTLSPDLSHTTLSPDLSQTTLSPDLSHTTLSPDLGHTTLSPDLSHTTLSPDLGHATLSPDLSHTTLSPDLGHTTLSPDLGHTTLSPDFSQTTLSPDLGHTTLSSDVSHTTLSPDLSHTTLSPDLSHTTLSPDLGHTTLSPDLSQTTLSPDLGHMTLSPDLSHTTLSPDLGHTTLSPDLSHTTLSPDLGHMTLSPDLGQTTLSLDFGQTTLSPDLSHMTLSSELSHETLSPDLSQVTLSPDLSEIPFSPDLWQTTLSSDLNETTLSPDLRQTSPHPDPDKTSYISESSQSVTLPEFGQTSPFPDLGQRPSPPSHSTLNNTFIPREFNPMVVVGLSRDDGDYVEIIPRQQEENSEEDYVKIDYVEYDDPYQTDVRTDINSSRNPDNIAAWYLRSNNGNRRNYYIAAEELSWDYSKFTQREDIDDVPEHTIYKKVVFRKYLDSTFTKLDPRGEYEEHLGILGPIIRAEVDDVIQVRFKNLASRPYSLHAHGLSYEKSSEGKTYEDDSPEWFKEDNAVQPNSSYTYVWHATERSGPESPGSACRAWAYYSAVNPEKDIHSGLIGPLLICRKGTLHKENNMPVDMREFVLLFMVFDEKKSWYYEKKFTRSWRLTSSEVKNSHKFHAINGMIYNLPGLRMYEQEWVRLHLLNLGGSRDIHVVHFHGQTLLENGTQQHQLGVWPLLPGSFKTLEMKTSKAGWWLLDTEVGENQRAGMQTPFLIIDRECKMPMGLSTGLIADSQIKASEFWGHWQPKLARLNNGGSYNAWITDKFSGESNSKPWIQVDMQREVVFTGIQTQGAKYYLKSYYTTEFNVAYSSDQRNWRIFKGNSTKNVMYFNGNSDASTITENQFDPPVVARYIRISPTESYNKPALRLELQGCEVNGCSTPLGMESGNIKNEQITASSFKKSWWGDYWEPFRARLNAQGRVNAWQAKANNNNQWLQIDLLKIKKITAITTQGCKSLSSEMYVKRYTIQYSDRGVEWKSYREKSSMVDKIFEGNNNIKGHVKNFFNPPIISRFIRIIPKMWNQSIALRLELFGCDIY

SEQ ID NO: 426 - protein, 459 aa, Sus scrofa
MWQLASLLLLLIIWAVSSTPVPPDSVFSSSQRAHQMLRSKRANSFLEELRPSSLERECKEETCDFEEAREIFQNTENTMAFWSKYHDGDQCAVSPPEHLCDSPCCGRGTCIDGLGGFRCDCAQGWEGRFCLHEVRFSNCSTENGGCAHYCLEEEGGRRCACAPGYRLGDDHLQCEPKVRSPCGRLGNRMEKKRKNLKRDTDQVDKKEDQIDPRLVNGKQSPWGESPWQVILLDSKKKLACGAVLIHVSWVLTAAHCLDDYKKLTVRLGEYDLRRREKWEVDLDIKEFLVHPNYTRSTSDNDIALLRLAEPATFSQTIVPICLPDSGLSERELTRVGQETVVTGWGYRSEAKTNRSFILNFIKVPVAPHNECVQAMHNKISENMLCAGILGDSRDACEGDSGGPMVASFRGTWFLVGLVSWGEGCGRLHNYGVYTKVSRYLDWIHGHIRMEEAFHKNQVP

SEQ ID NO: 427 - protein, 415 aa, Sus scrofa
MSLFLALGLLVAGLCSRVHCVPADDPASKIVTLKDQIKKLPAHNTAVVSSNTDFAFSLYKQLALTNPHENVIFSPLSVSMALAFLSLGARGPTLTELLEGLKFNLTKTPEAEIHQGFQHLLSTLDRSSNLLQLRLGNAMFIDEQLELLDKFVQDAHELYHSEAFPTNFQDLEAARRLINDYVKNKTEGKIVDLFKKLDPLTKVVLVNYIYFKAKWKTPFNPNLTTEADFHVSKNRTVRVPMMGIRALTVPYFRDEELACTVVELPYTSNDSALFILPDDGRMAAVEAKLLPETLRRWRDFLQPRWIVELYLPKFSISSDYRLHEILPQLGIEEIFGDNANLSGITNTKPLKVSQVVHSAVLDVNEEGTEAAAATGIDINVRSLERIALHFNRPFLFVIISKDIQSIIFLGKVTKP

SEQ ID NO: 428 - protein, 843 aa, Sus scrofa
MKAMSLVFLVGLIGEFQVFSSASSPVNCQWDSYAPWSECNGCTKTQTRRRPVAVYGQYGGHPCVGSTFETQSCEPTRGCPTEEGCGERFRCFSGQCISKSLVCNGDSDCEEDSADEDRCEDSESRPSCDLSKPPPNIELTGNGYNALTGQFRNRVLNTKSFGGQCRKVFSGDGRDFYRLSGNVLSYTFQVKVNNDFNYEFYNSTWSYAKHTSTEHTSSSKGRVFIFSSSSSSSSYYAKTYEILKKKSYQLLVVQNTVEVAQFINNNPEFLQLAESFWKELSYLPPLYDYSAYRRLIDQYGTHYLQSGSLGGEYKVLFYVDSEKVAESDLGSEDKKKCASSHISFLFKSSKHKCKAMEEALKSASGTQSNVLRGVPFVRGGRPGFVSGLSYLELDNPDGNKQRYSSWAGSVTDLPQVIKQKLTPLYELVKEVPCASVKRLYLKRALEEYLDEFDSCHCQPCQNGGMASVEGTQCQCHCKPNTFGVACEQGVLVGDHAGGIDGGWSCWSSWGPCAQGKKTRSRKCNNPPPSGGGKSCIGETSESRQCEDEDLEHLRLLEPHCFPLSLVPTEFCPSPPALKDGFVQNEETTFPVGKNIVYSCNEGYSLVGDPVARCGEDLQWTVGKMHCQKIACVLPTLMRGLQSHPQKPFYTVGEKVTFSCSSGMSLEGPSTFLCGSSLKWSPEMKNVQCVRKEAPLAKKVPECQLWEKLQNSKCVCKMPYECGSSLDVCARDERSKRILRLTVCKMHVLQCQGRNYTLSVGETCTLPGSAEKACGACPLWEKCDAQSSKCVCRAASECEEAGFRVCVEVNGREQTMTECEAGVLRCLGLSITVTSIRPCAPEAP

SEQ ID NO: 429 - protein, 252 aa, Sus scrofa
MAWRLTLFVLLGLVAAVGGARAKSDMLNVCMDAKHHKPKPSPEDKLHDQCSPWRKNSCCSVNTSLEAHKDISYLYRFNWDHCGKMEPACKRHFIQDTCLYECSPNLGPWIQEVNQKWRRERILNVPLCKEDCQIWWEDCRTSYTCKSNWHKGWNWTSGYNQCPVSAACHRFDFYFPTPAALCNEIWSHSFEVSSYSRGSGRCIQMWFDPAQGNPNEAVARYYAENGDAGAVAQGIGPLLTNLTEMVKHWVTG

SEQ ID NO: 430 - protein, 240 aa, Sus scrofa
MSLFPSLHLLLLIVMTASHTETENCEDIQNTCLVISCDSPGINGLPGKDGLDGAKGEKGEPGQGLIGLQGLPGMVGPQGSPGIPGLPGLKGQKGDSGIDPGNSLANLRSELDNIKKWLIFAQGKQVGKKLYLTNGKKMSFNGVKALCAQFQASVATPTNSRENQAIQELAGTEAFLGITDEYTEGQFVDLTGKRVRYQNWNDGEPNNADSAEHCVEILKDGKWNDIFCSSQLSAVCEFPA

SEQ ID NO: 431 - protein, 120 aa, Sus scrofa
MRFPAQLLGLLLLWVPGSDGAIVLTQTPLSLSVSPGEPASISCRSSQSLLHTDGKNYLNWYLQKPGQSPQRLIYQATNRDTGVPDRFSGSGSGTDFTLKISRVEAEDVGVYYCFQALQSP

SEQ ID NO: 432 - protein, 126 aa, Sus scrofa
MLFLGGRPWALPSLCFCILVLACVVACQQAVLEESPTPSPEPKASHAWSLVPGKMKEWVQPLVTRTRERWEWFWGPGAFQGFVQTYYDDHLRDLGSRTKAWIHSSKDSLLNKAHSLCPQLFCGSRD

SEQ ID NO: 433 - protein, 475 aa, Sus scrofa
MATCSRQFTSSSSMKGSCGIGGGSSRISSVLGGGSYQAPSAYGGLSVTSSRYSSGGVCGLGGGYGGGFSSSSSFGGALGSGFGGGYGGGLGAGFGGGFGGGFGGGFGGGDGLLVGSEKVTMQNLNDRLASYLDKVRALEEANADLEVKIRDWYQRQRPAESKDYSPYFKTIEDLRNKILTATVDNANVVLQIDNARLAADDFRTKYETELNLRMSVEADINGLRRVLDELTLARADLEMQIESLKEELAYLRKNHEEEMNALRGQVGGDVNVEMDAAPGVDLSRILNEMRDQYEKMAEKNRKDAEDWFFSKTEELNREVATNSELVQSGKSEISELRRTVQNLEIELQSQLSMKASLENSLEETKGRYCMQLAQIQELISGVEEQLAQLRCEMEQQNQEYKILLDVKTRLEQEIATYRRLLEGEDAHLSSSQFSSGSQSSRDGKTFLLIKPGLRTTPCLPAGNDSPSSFLPSQKA

SEQ ID NO: 434 - protein, 503 aa, Sus scrofa
TEGFCAHCCRCRPKMPAVQLLLLACLVWSAGARTAQLWKANDQSGQCQYTFKVASPNESSCPEQGQTMSALQDLQRDSSEQRAALESTKARLSSLEALLHRLILGQATGPWEAQEGLEKELGTLRREREQLETQNRELETTYNNLARDKSALEEEKRQLETENEDLARRLESSSQELAKLKVQCPQAHSMSQDVPLGSREVSKWNVENLDFQELKSELTEVPAARILKESVSGHSGSEEGGSGCGELVWVGEPVTLRTAETITGKYGVWMRDPKATYPYTQETTWRIDTVGTDIRQVFEYDRISQFAQGYPSKVHVLPRRLESTGAVVYQGSLYFQGASSRTVIRYELSTETLKAEKEIPGAGYHGQFPYSWGGYTDIDLAVDETGLWVIYSTEAAKGAIVLSKLNPENLELERTWETNIRKQSVANAFIICGTLYTVSSYSSPEATINFAYDTSTGSSKALTIPFKNRYEYSSMIDYNPLEKKLFAWDNFNMVTYDIRLSRM

SEQ ID NO: 435 - protein, 2321 aa, Sus scrofa
YQIRLWIQEKLQQLKAQIQNIDIQHLAEKLKQQVEDIDARVLLDQLRTTIPFQEIKEVIEHVKYCVKSLFEDFEVTKEINAFRAMVHELIKMYKIDEHIQVLMDNSVHLAHQYKLQETVQKLSSILQQVKIQDLLETLTWFIDDTLKQLEALSFQQLIEEVNKFLDMLVKRLRSFDYHHFLDETNKNLHEVTQRINGKIQALELPQKFTALKLLSEDIKALISVHLENLKATKITLFFDWLQGTLSSTPIVHMKAKFHETLEDVRDRMYQMDVQQEIQRYLFLVGQVYSTLVTYISDWWDLAAKNLTDFAEQYSIQDWAKNLKALVEQGFTVPEIQTTFGTLPAFEVSLRALQEATYQTPDFIVPLTDLKIPSVQINFKKLKDIEIPSRFSTPEFTVLNTFHVPSFTIDLVEIKAKIIRTIDQMLNSELQWPVPEVYLRDLNGVETMLARITLPDLYLPEIRIPEFVIPNLNLTDFQVSDLHIPEFQLPHIPHTVEVPAFGKLHGILKIQSPLLILEANANIQNITTSENTAEMEASFTAKGESKFEVLNFDFQANAQLSDPEINPLVLKESVRFSSKYLKTEHGSEVLFVGNSIEGKSNTVAGLYTGKNTLKLSNDVLLKVNNQLTLNSNTKYFHELNIPKLDFSSQADLRSEIKTLLEASHIAWRSSGKGSWKLACHRFSDEGTHESQISFTVEGPITSFGLSNEIRSKHLRVNQSMVYESAFLKFSKFEIHSQAECQYVGRSVLTAKGMVLPRERKAEITGNHDAHLNGKVIGTLKNSLFFSAQPLEITASTINEGNLRVSFPLKLTGKIDFLNNYALLLSPSAQQASWQASARFNQYKYNQNFSAVNNERSTEAHIGINGEANLDFLNIPLTIPEMTLPYTRLTVPQVKDISLWEKTGLKEFLKTTKQSFDLSVKAQYKKNKDKHSIPNPLDVFYAFINRNINSFNRHFETVRDKALDFFTESYNEIKITFDKYKVEKPLDQQPRTFQIPGYTIPVINIEVSPFTVKMLTFGYVIPKEISTPNITILGSGISVPSYTLGLQFLELPALDVPRNILQISLPELAVSGTSNKILIPAMGNITYDFSFKSSVITLNTNVGLYNQSNIVAHFLTFSSSVIDALQYKLEGTSSLMRKRGLKLATALSLSNKFMEGNHDSTISFTKKNVDASLTTTARVQLPILRMNFKQELKGNTKSKPTISSSIELKYDFNSPKLHSTAAGAVDHKLSLESLTSYFSIEMSTKGDVKGSILSRVYSGSLASEASTYVNSKGTRSSVKLQGASKVDDIWNLEVKENFAGEATLLRIYTIWEHHTKNHLQLEGLILTSGEHTSKATLELSPWNIAALVQVHTRQPSSLLNIHYLSQEVSLNANTENQKISWKSQVQVHSGSLQNNLQLSNDKEEARFDISGSVEGYLSFLKYTVLPVYDMSLWDLLKLDVTTSINRKQYLRASTALVYTKNPNAYPVSIPVQELTDKFIIPGLKLNNLKSAHVTPAFQVPFTDLRFPSYTLDFSEIKIYKKLSTSSFSLNIPTLPKVKFPKVDVLTQYSNPETSSVPFFEVTVPAYQLTVSPFTLPKSISVGSAVLDLDVVASYIADFEVPTVTMPEQTIEIPSIKFSVPAGISLPSFGTLTARFGVASPLYNATWSAGLKNKEDRVETFLDSTCSSTIQFLEYDLNVVGTHKIEDGMLVCSTKGSFAHRDLSAEYEENGKYHGLEYWDGKIILNITSPTLTDVYLRYQQSKNHLFSSLASPAIGTVALEQENINTSLKSNLYYRPQSSPDKKLNIFKIEKRDLESDEDVQIKANWEEEAVSELLRSLKDNVPKATGAFYDYVNKYHQEYTGLDLRDASLKLRKGLQNSADQAYQGAVRQIDEVDRGLRKIARGTTKTYQQWKDRAQSLYQKLLAQEDQGDFQGLRNKVFDSVIGVTQEYNVTVKRAVDSLIKSLKFTRFQLPGRARNYTGDELCNMVMTEVGEVLSQIYSKIHSGLEILLSYFQDLMEKSKLNKARKIKFTFDSVKYQLTDVVSEYGEQLKSLSQDVQKALSDLHSINITEILSELQIFLEGIFQEIEEELTRLKEKKLADFINDIQQNINTTFNIYAPLGFRLLKENLDSPFGMLNEFIQNTLWEASQELQQLHQYIKALRKEYFDPSMVGWTVKYYELEEKVINLIKNLVDVLKDFHSKYTVSATDFASQLSSQVEQFVQEDIQEYLSILADADGKGKEKIAQLSSRAQEIIKSWAVTMKEIISDYHQQFIYKLQDFSDQLSDYYEKFIAETERLIDLSIQKYHMFLRYIMKLLKELQSDTVNDMRPYIKVAPGEFTITF

SEQ ID NO: 436 - protein, 115 aa, Sus scrofa
MAHQFPALTPEQRKELSEIAQRIVANGKGILAADESVGTMGNRLQRIKVENTEENRRQFREILFTVDNSINQSIGGVILFHETLYQKDSQGKLFRDILKEKGIVLGIKVNTFCFS

SEQ ID NO: 437 - protein, 240 aa, Sus scrofa
MRFPAQLLGLLLLWVPGSSGAIVLTQSPLSLSVSPGAPASISCRSSQSLESYSYNFLSWYQQKPGQSPRLLIYFATNKASGVPDRFSGSGSGTDFTLKISRVEAEDAGVYYCQQKSTVPHSFGSGTKVEPKRADAKPSVFIFPPSKEQLETQTVSVVCLLNSFFPREVNVKWKVDGVVQSSGILDSVTEQDSKDSTYSLSSTLSLPTSQYLSHNLYSCEVTHKTLASPLVKSFSRNECEA

SEQ ID NO: 438 - protein, 121 aa, Sus scrofa
MRFPAQLLGLLLLWVPGSSGAIVLTQTPLSLSVSPGEPASISCRSSQSLVDSDGDSLLHWYLQKPGQSPRLLFYFATNRASWVPERFSGSGSGTDFTLKISRVEAEDAGVYYCQQYKEFPP
